(19) United States
(12) Patent Application Publication
(10) Pub. No.: US 2012/0034666 A1
(43) Pub. Date: Feb. 9, 2012

(54) METHODS OF INCREASING DIHYDROXY ACID DEHYDRATASE ACTIVITY TO IMPROVE PRODUCTION OF FUELS, CHEMICALS, AND AMINO ACIDS

(75) Inventors: Andrew C. HAWKINS, Parker, CO (US); Aristos Aristidou, Highlands Ranch, CO (US); Doug Lies, Parker, CO (US); Lynne H. Albert, Golden, CO (US)

(73) Assignee: GEVO, INC., Englewood, CO (US)

(21) Appl. No.: 13/279,166

(22) Filed: Oct. 21, 2011

Related U.S. Application Data
(63) Continuation-in-part of application No. 13/228,342, filed on Sep. 8, 2011, now Pat. No. 8,071,358.
Application No. 13/228,342 is a division of application No. 12/953,884, filed on Nov. 24, 2010, now Pat. No. 8,017,376.
(60) Provisional application No. 61/454,943, filed on Mar. 21, 2011.
(60) Provisional application No. 61/263,952, filed on Nov. 24, 2009.
(60) Provisional application No. 61/350,209, filed on Jun. 1, 2010.

(51) Int. Cl. C12P 7/16; C12N 1/19

(52) U.S. Cl. 435/160; 435/254.2

(57) ABSTRACT

The present invention is directed to recombinant microorganisms comprising one or more dihydroxyacid dehydratase (DHAD)-requiring biosynthetic pathways and methods of using said recombinant microorganisms to produce beneficial metabolites derived from said DHAD-requiring biosynthetic pathways. In various aspects of the invention, the recombinant microorganisms may be engineered to overexpress one or more polynucleotides encoding one or more Nfs1 proteins or homologs thereof and/or one or more polynucleotides encoding one or more Isd11 proteins or homologs thereof. In some embodiments, the recombinant microorganisms may comprise a cytosolically localized DHAD enzyme. In additional embodiments, the recombinant microorganisms may comprise a mitochondrially localized DHAD enzyme. In various embodiments described herein, the recombinant microorganisms may be microorganisms of the Saccharomyces clade, Crabtree-negative yeast microorganisms, Crabtree-positive yeast microorganisms, post-WGD (whole genome duplication) yeast microorganisms, pre-WGD (whole genome duplication) yeast microorganisms, and non-fermenting yeast microorganisms.

### CROSS-REFERENCE TO RELATED APPLICATIONS

[0001] This application claims priority to U.S. Provisional Application Ser. No. 61/454,943, filed Mar. 21, 2011, and is a continuation-in-part application of U.S. Application Serial No. 13/228,342, filed Sep. 8, 2011, which is a divisional of U.S. application Ser. No. 12/953,884, filed Nov. 24, 2010, now U.S. Pat. No. 8,017,376, which claims the benefit of U.S. Provisional Application Ser. No. 61/263,952, filed Nov. 24, 2009, and U.S. Provisional Application Ser. No. 61/350,209, filed Jun. 1, 2010, all of which are herein incorporated by reference in their entireties for all purposes.

### ACKNOWLEDGMENT OF GOVERNMENTAL SUPPORT

[0002] This invention was made with government support under Contract No. IIP-0823122, awarded by the National Science Foundation, and under Contract No. EP-D-09-023, awarded by the Environmental Protection Agency. The government has certain rights in the invention.

### TECHNICAL FIELD

[0003] Recombinant microorganisms and methods of producing such organisms are provided. Also provided are methods of producing beneficial metabolites including fuels, chemicals, and amino acids by contacting a suitable substrate with recombinant microorganisms and enzymatic preparations therefrom.

### DESCRIPTION OF THE TEXT FILE SUBMITTED ELECTRONICALLY

[0004] The contents of the text file submitted electronically herewith are incorporated herein by reference in their entirety: A computer readable format copy of the Sequence Listing (filename: GEVO_{—}041_{—}15US_SeqList_ST25.txt, date recorded: Oct. 19, 2011, file size: 748 kilobytes).

### BACKGROUND

[0005] Dihydroxyacid dehydratase (DHAD) is an enzyme that catalyzes the conversion of 2,3-dihydroxyisovalerate to α-ketoisovalerate and of 2,3-dihydroxy-3-methylvalerate to 2-keto-3-methylvalerate. This enzyme plays an important role in a variety of biosynthetic pathways, including pathways producing valine, isoleucine, leucine and pantothenic acid (vitamin B5). DHAD also catalyzes the conversion of 2,3-dihydroxyisovalerate to α-ketoisovalerate as part of isobutanol biosynthetic pathways disclosed in commonly owned and co-pending US Patent Publication Nos. 2009/0226991 and 2010/0143997. In addition, biosynthetic pathways for the production of 3-methyl-1-butanol and 2-methyl-1-butanol use DHAD to convert 2,3-dihydroxyisovalerate to α-ketoisovalerate and 2,3-dihydroxy-3-methylvalerate to 2-keto-3-methylvalerate, respectively (Atsumi et al., 2008, Nature 451(7174): 86-9).

[0006] DHAD is an essential enzyme in all of these biosynthetic pathways, hence, it is desirable that recombinant microorganisms engineered to produce the above-mentioned compounds exhibit optimal DHAD activity. The optimal level of DHAD activity will typically have to be at levels that are significantly higher than those found in non-engineered microorganisms in order to sustain commercially viable productivities, yields, and titers. The present application addresses this need by engineering recombinant microorganisms to improve their DHAD activity.

### SUMMARY OF THE INVENTION

[0007] The present inventors have discovered that overexpression of the iron sulfur (“FeS” or “Fe/S”) cluster assembly genes NFS1 and ISD11 in a recombinant yeast microorganism improves DHAD activity. Thus, the invention relates to recombinant yeast cells engineered to provide increased heterologous or native expression of NFS1 and/or ISD11 or homologs thereof. In general, cells that overexpress NFS1 and/or ISD11 or homologs thereof exhibit an enhanced ability to produce beneficial metabolites such as isobutanol, 3-methyl-1-butanol, 2-methyl-1-butanol, 1-butanol, valine, isoleucine, leucine, and pantothenic acid.

[0008] One aspect of the invention is directed to a recombinant microorganism comprising a DHAD-requiring biosynthetic pathway, wherein said microorganism is engineered to overexpress one or more polynucleotides encoding one or more cysteine desulfurase (Nfs1) proteins or homologs thereof. In one embodiment, the Nfs1 protein is selected from SEQ ID NO: 227, SEQ ID NO: 229, SEQ ID NO: 231, SEQ ID NO: 233, SEQ ID NO: 235, SEQ ID NO: 237, SEQ ID NO: 239, SEQ ID NO: 241, SEQ ID NO: 243, SEQ ID NO: 245, SEQ ID NO: 247, and SEQ ID NO: 249, or homologs thereof. In one embodiment, one or more of the polynucleotides encoding said one or more Nfs1 proteins or homologs thereof is a native polynucleotide. In another embodiment, one or more of the polynucleotides encoding said one or more Nfs1 proteins or homologs thereof is a heterologous polynucleotide.

[0009] Another aspect of the invention is directed to a recombinant microorganism comprising a DHAD-requiring biosynthetic pathway, wherein said microorganism is engineered to overexpress one or more polynucleotides encoding one or more iron-sulfur protein biogenesis desulfurase-interacting (Isd11) proteins or homologs thereof. In one embodiment, the Isd11 protein is selected from SEQ ID NO: 251, SEQ ID NO: 253, SEQ ID NO: 255, SEQ ID NO: 257, SEQ ID NO: 259, SEQ ID NO: 261, SEQ ID NO: 263, SEQ ID NO: 265, SEQ ID NO: 267, SEQ ID NO: 269, SEQ ID NO: 271, and SEQ ID NO: 273, or homologs thereof. In one embodiment, one or more of the polynucleotides encoding said one or more Isd11 proteins or homologs thereof is a native polynucleotide. In another embodiment, one or more of the polynucleotides encoding said one or more Isd11 proteins or homologs thereof is a heterologous polynucleotide.

[0010] Another aspect of the invention is directed to a recombinant microorganism comprising a DHAD-requiring biosynthetic pathway, wherein said microorganism is engineered to overexpress one or more polynucleotides encoding one or more Nfs1 proteins or homologs thereof and one or more polynucleotides encoding one or more encoding one or more Isd11 proteins or homologs thereof. In one embodiment, one or more of the polynucleotides encoding said one or more Nfs1 proteins or one or more of the polynucleotides encoding said one or more Isd11 proteins or homologs thereof is a native polynucleotide. In another embodiment, one or more of the polynucleotides encoding said one or more Nfs1 proteins or one or more of the polynucleotides encoding said one or more Isd11 proteins or homologs thereof is a heterologous polynucleotide.

[0011] Another aspect of the invention is directed to a recombinant microorganism comprising a DHAD-requiring biosynthetic pathway, wherein the activity of one or more Nfs1 proteins or homologs thereof and/or one or more Isd11 proteins or homologs thereof is increased. In one embodiment, one or more of the Nfs1 proteins and/or one or more of the Isd11 proteins is encoded by a native polynucleotide. In another embodiment, one or more of the Nfs1 proteins and/or one or more of the Isd11 proteins is encoded by a heterologous polynucleotide.

[0012] In various embodiments described herein, the recombinant microorganisms of the invention that comprise a DHAD-requiring biosynthetic pathway may also be engineered to overexpress one or more polynucleotides encoding one or more Aft proteins or homologs thereof as described below.

[0013] In various embodiments described herein, the DHAD-requiring biosynthetic pathway may be selected from isobutanol, 3-methyl-1-butanol, 2-methyl-1-butanol, valine, isoleucine, leucine, and/or pantothenic acid biosynthetic pathways. In various embodiments described herein, the DHAD enzyme which acts as part of an isobutanol, 3-methyl-1-butanol, 2-methyl-1-butanol, valine, isoleucine, leucine, and/or pantothenic acid biosynthetic pathway may be localized to the cytosol. In alternative embodiments, the DHAD enzyme which acts as part of an isobutanol, 3-methyl-1-butanol, 2-methyl-1-butanol, valine, isoleucine, leucine, and/or pantothenic acid biosynthetic pathway may be localized to the mitochondria. In additional embodiments, a DHAD enzyme which acts as part of an isobutanol, 3-methyl-1-butanol, 2-methyl-1-butanol, valine, isoleucine, leucine, and/or pantothenic acid biosynthetic pathway is localized to the cytosol and the mitochondria.

[0014] As described herein, an exemplary DHAD-requiring biosynthetic pathway is an isobutanol producing biosynthetic pathway, i.e., an isobutanol producing metabolic pathway. Accordingly, one specific aspect of the invention is directed to a recombinant microorganism for producing isobutanol, wherein said recombinant microorganism comprises an isobutanol producing metabolic pathway and wherein said microorganism is engineered to overexpress one or more polynucleotides encoding one or more Nfs1 proteins or homologs thereof. In one embodiment, one or more of the polynucleotides encoding said one or more Nfs1 proteins or homologs thereof is a native polynucleotide. In another embodiment, one or more of the polynucleotides encoding said one or more Nfs1 proteins or homologs thereof is a heterologous polynucleotide.

[0015] Another aspect of the invention is directed to a recombinant microorganism for producing isobutanol, wherein said recombinant microorganism comprises an isobutanol producing metabolic pathway and wherein said microorganism is engineered to overexpress one or more polynucleotides encoding one or more Isd11 proteins or homologs thereof. In one embodiment, one or more of the polynucleotides encoding said one or more Isd11 proteins or homologs thereof is a native polynucleotide. In another embodiment, one or more of the polynucleotides encoding said one or more Isd11 proteins or homologs thereof is a heterologous polynucleotide.

[0016] Another aspect of the invention is directed to a recombinant microorganism for producing isobutanol, wherein said recombinant microorganism comprises an isobutanol producing metabolic pathway and wherein said microorganism is engineered to overexpress one or more polynucleotides encoding one or more Nfs1 proteins or homologs thereof and one or more polynucleotides encoding one or more encoding one or more Isd11 proteins or homologs thereof. In one embodiment, one or more of the polynucleotides encoding said one or more Nfs1 proteins or one or more of the polynucleotides encoding said one or more Isd11 proteins or homologs thereof is a native polynucleotide. In another embodiment, one or more of the polynucleotides encoding said one or more Nfs1 proteins or one or more of the polynucleotides encoding said one or more Isd11 proteins or homologs thereof is a heterologous polynucleotide.

[0017] Another aspect of the invention is directed to a recombinant microorganism for producing isobutanol, wherein said recombinant microorganism comprises an isobutanol producing metabolic pathway and wherein the activity of one or more Nfs1 proteins or homologs thereof and/or one or more Isd11 proteins or homologs thereof is increased. In one embodiment, one or more of the Nfs1 proteins and/or one or more of the Isd11 proteins is encoded by a native polynucleotide. In another embodiment, one or more of the Nfs1 proteins and/or one or more of the Isd11 proteins is encoded by a heterologous polynucleotide.

[0018] The present inventors have also discovered that overexpression of the transcriptional activator genes AFT1 and/or AFT2 or homologs thereof in a recombinant yeast microorganism improves DHAD activity. Thus, the invention relates to recombinant yeast cells engineered to provide increased heterologous or native expression of AFT1 and/or AFT2 or homologs thereof. In general, cells that overexpress AFT1 and/or AFT2 or homologs thereof exhibit an enhanced ability to produce beneficial metabolites such as isobutanol, 3-methyl-1-butanol, 2-methyl-1-butanol, valine, isoleucine, leucine, and pantothenic acid.

[0019] One aspect of the invention is directed to a recombinant microorganism comprising a DHAD-requiring biosynthetic pathway, wherein said microorganism is engineered to overexpress one or more polynucleotides encoding one or more Aft proteins or homologs thereof. In one embodiment, the Aft protein is selected from SEQ ID NO: 2, SEQ ID NO: 4, SEQ ID NO: 6, SEQ ID NO: 8, SEQ ID NO: 10, SEQ ID NO: 12, SEQ ID NO: 14, SEQ ID NO: 16, SEQ ID NO: 18, SEQ ID NO: 20, SEQ ID NO: 22, SEQ ID NO: 24, SEQ ID NO: 26, SEQ ID NO: 28, SEQ ID NO: 30, SEQ ID NO: 32, SEQ ID NO: 34, SEQ ID NO: 36, SEQ ID NO: 209, SEQ ID NO: 211, SEQ ID NO: 213, SEQ ID NO: 215, SEQ ID NO: 217, SEQ ID NO: 219, SEQ ID NO: 221, SEQ ID NO: 223, and SEQ ID NO: 225. In another embodiment, one or more of the polynucleotides encoding said one or more Aft proteins or homologs thereof is a native polynucleotide. In yet another embodiment, one or more of the polynucleotides encoding said one or more Aft proteins or homologs thereof is a heterologous polynucleotide.

[0020] In a specific embodiment according to this aspect, the invention is directed to a recombinant microorganism comprising a DHAD-requiring biosynthetic pathway, wherein said microorganism has been engineered to overexpress a polynucleotide encoding Aft1 (SEQ ID NO: 2) and/or Aft2 (SEQ ID NO: 4) or a homolog thereof. In one embodiment, the polynucleotide encoding the Aft protein or homolog thereof is native to the recombinant microorganism. In another embodiment, the polynucleotide encoding the Aft protein or homolog thereof is heterologous to the recombinant microorganism.

[0021] Another aspect of the invention is directed to a recombinant microorganism comprising a DHAD-requiring biosynthetic pathway, wherein the activity of one or more Aft proteins or homologs thereof is increased. In one embodiment, the Aft protein is selected from SEQ ID NO: 2, SEQ ID NO: 4, SEQ ID NO: 6, SEQ ID NO: 8, SEQ ID NO: 10, SEQ ID NO: 12, SEQ ID NO: 14, SEQ ID NO: 16, SEQ ID NO: 18, SEQ ID NO: 20, SEQ ID NO: 22, SEQ ID NO: 24, SEQ ID NO: 26, SEQ ID NO: 28, SEQ ID NO: 30, SEQ ID NO: 32, SEQ ID NO: 34, SEQ ID NO: 36, SEQ ID NO: 209, SEQ ID NO: 211, SEQ ID NO: 213, SEQ ID NO: 215, SEQ ID NO: 217, SEQ ID NO: 219, SEQ ID NO: 221, SEQ ID NO: 223, and SEQ ID NO: 225. In one embodiment, the polynucleotide encoding the Aft protein or homolog thereof is native to the recombinant microorganism. In another embodiment, the polynucleotide encoding the Aft protein or homolog thereof is heterologous to the recombinant microorganism.

[0022] Another aspect of the invention is directed to a recombinant microorganism comprising a DHAD-requiring biosynthetic pathway, wherein said microorganism has been engineered to overexpress one or more polynucleotides encoding one or more proteins or homologs thereof regulated by an Aft protein or homolog thereof. In one embodiment, the proteins regulated by an Aft protein or homolog thereof are selected from FET3, FET4, FET5, FTR1, FTH1, SMF3, MRS4, CCC2, COT1, ATX1, FRE1, FRE2, FRE3, FRE4, FRE5, FREE, FIT1, FIT2, FIT3, ARN1, ARN2, ARN3, ARN4, ISU1, ISU2, TIS11, HMX1, AKR1, PCL5, YOR387C, YHL035C, YMR034C, ICY2, PRY1, YDL124W, BNA2, ECM4, LAP4, YOL083W, YGR146C, B105, YDR271C, OYE3, CTH1, CTH2, MRS3, MRS4, HSP26, YAP2, VMR1, ECL1, OSW1, NFT1, ARA2, TAF1/TAF130/TAF145, YOR225W, YKR104W, YBR012C, and YMR041C or homologs thereof. In a specific embodiment, the protein regulated by an Aft protein or homolog thereof is ENB1. In another specific embodiment, the protein regulated by an Aft protein or homologs thereof is FET3. In yet another specific embodiment, the protein regulated by an Aft protein or homolog thereof is SMF3. In one embodiment, all genes demonstrated to increase DHAD activity and/or the production of a metabolite from a DHAD-requiring biosynthetic pathway are overexpressed. Where none of the AFT regulon genes expressed alone are effective in increasing DHAD activity and/or the production of a metabolite from a DHAD-requiring biosynthetic pathway, then 1, 2, 3, 4, 5, or more of the genes in the AFT regulon may be overexpressed together.

[0023] In various embodiments described herein, the DHAD-requiring biosynthetic pathway may be selected from isobutanol, 3-methyl-1-butanol, 2-methyl-1-butanol, valine, isoleucine, leucine, and/or pantothenic acid biosynthetic pathways. In various embodiments described herein, the DHAD enzyme which acts as part of an isobutanol, 3-methyl-1-butanol, 2-methyl-1-butanol, valine, isoleucine, leucine, and/or pantothenic acid biosynthetic pathway may be localized to the cytosol. In alternative embodiments, the DHAD enzyme which acts as part of an isobutanol, 3-methyl-1-butanol, 2-methyl-1-butanol, valine, isoleucine, leucine, and/or pantothenic acid biosynthetic pathway may be localized to the mitochondria. In additional embodiments, a DHAD enzyme which acts as part of an isobutanol, 3-methyl-1-butanol, 2-methyl-1-butanol, valine, isoleucine, leucine, and/or pantothenic acid biosynthetic pathway is localized to the cytosol and the mitochondria.

[0024] In one embodiment, the invention is directed to a recombinant microorganism for producing isobutanol, wherein said recombinant microorganism comprises an isobutanol producing metabolic pathway and wherein said microorganism is engineered to overexpress one or more polynucleotides encoding one or more Aft proteins or homologs thereof. In one embodiment, the Aft protein is selected from SEQ ID NO: 2, SEQ ID NO: 4, SEQ ID NO: 6, SEQ ID NO: 8, SEQ ID NO: 10, SEQ ID NO: 12, SEQ ID NO: 14, SEQ ID NO: 16, SEQ ID NO: 18, SEQ ID NO: 20, SEQ ID NO: 22, SEQ ID NO: 24, SEQ ID NO: 26, SEQ ID NO: 28, SEQ ID NO: 30, SEQ ID NO: 32, SEQ ID NO: 34, SEQ ID NO: 36, SEQ ID NO: 209, SEQ ID NO: 211, SEQ ID NO: 213, SEQ ID NO: 215, SEQ ID NO: 217, SEQ ID NO: 219, SEQ ID NO: 221, SEQ ID NO: 223, and SEQ ID NO: 225.

[0025] In a specific embodiment, the invention is directed to a recombinant microorganism for producing isobutanol, wherein said recombinant microorganism comprises an isobutanol producing metabolic pathway and wherein said microorganism is engineered to overexpress a polynucleotide encoding Aft1 (SEQ ID NO: 2) or a homolog thereof. In another specific embodiment, the invention is directed to a recombinant microorganism for producing isobutanol, wherein said recombinant microorganism comprises an isobutanol producing metabolic pathway and wherein said microorganism is engineered to overexpress a polynucleotide encoding Aft2 (SEQ ID NO: 4) or a homolog thereof. In yet another embodiment, the invention is directed to a recombinant microorganism for producing isobutanol, wherein said recombinant microorganism comprises an isobutanol producing metabolic pathway and wherein said microorganism is engineered to overexpress a polynucleotide encoding Aft1 (SEQ ID NO: 2) or a homolog thereof and Aft2 (SEQ ID NO: 4) or a homolog thereof.

[0026] In each of the aforementioned aspects and embodiments, the Aft protein may be a constitutively active Aft protein or a homolog thereof. In one embodiment, the constitutively active Aft protein or homolog thereof comprises a mutation at a position corresponding to the cysteine 291 residue of the native S. cerevisiae Aft1 (SEQ ID NO: 2). In a specific embodiment, the cysteine 291 residue is replaced with a phenylalanine residue. In another embodiment, the constitutively active Aft protein or homolog thereof comprises a mutation at a position corresponding to the cysteine 187 residue of the native S. cerevisiae Aft2 (SEQ ID NO: 2). In a specific embodiment, the cysteine 187 residue is replaced with a phenylalanine residue.

[0027] In another embodiment, the invention is directed to a recombinant microorganism for producing isobutanol, wherein said recombinant microorganism comprises an isobutanol producing metabolic pathway, wherein said microorganism has been engineered to overexpress one or more polynucleotides encoding one or more proteins or homologs thereof regulated by an Aft protein or homolog thereof. In one embodiment, the proteins regulated by Aft or a homolog thereof are selected from FET3, FET4, FET5, FTR1, FTH1, SMF3, MRS4, CCC2, COT1, ATX1, FRE1, FRE2, FRE3, FRE4, FRE5, FREE, FIT1, FIT2, FIT3, ARN1, ARN2, ARN3, ARN4, ISU1, ISU2, TIS11, HMX1, AKR1, PCL5, YOR387C, YHL035C, YMR034C, ICY2, PRY1, YDL124W, BNA2, ECM4, LAP4, YOL083W, YGR146C, B105, YDR271C, OYE3, CTH1, CTH2, MRS3, MRS4, HSP26, YAP2, VMR1, ECL1, OSW1, NFT1, ARA2, TAF1/TAF130/TAF145, YOR225W, YKR104W, YBR012C, and YMR041C or homologs thereof. In a specific embodiment, the protein regulated by an Aft protein or homolog thereof is ENB1. In another specific embodiment, the protein regulated by an Aft protein or homologs thereof is FET3. In yet another specific embodiment, the protein regulated by an Aft protein or homolog thereof is SMF3. In one embodiment, all genes demonstrated to increase DHAD activity and/or the production of a metabolite from a DHAD-requiring biosynthetic pathway are overexpressed. Where none of the AFT regulon genes expressed alone are effective in increasing DHAD activity and/or the production of a metabolite from a DHAD-requiring biosynthetic pathway, then 1, 2, 3, 4, 5, or more of the genes in the AFT regulon may be overexpressed together.

[0028] In various embodiments described herein, the recombinant microorganism comprises an isobutanol producing metabolic pathway. In one embodiment, the isobutanol producing metabolic pathway comprises at least one exogenous gene encoding a polypeptide that catalyzes a step in the conversion of pyruvate to isobutanol. In another embodiment, the isobutanol producing metabolic pathway comprises at least two exogenous genes encoding polypeptides that catalyze steps in the conversion of pyruvate to isobutanol. In yet another embodiment, the isobutanol producing metabolic pathway comprises at least three exogenous genes encoding polypeptides that catalyze steps in the conversion of pyruvate to isobutanol. In yet another embodiment, the isobutanol producing metabolic pathway comprises at least four exogenous genes encoding polypeptides that catalyze steps in the conversion of pyruvate to isobutanol. In yet another embodiment, the isobutanol producing metabolic pathway comprises at least five exogenous genes encoding polypeptides that catalyze steps in the conversion of pyruvate to isobutanol. In yet another embodiment, all of the isobutanol producing metabolic pathway steps in the conversion of pyruvate to isobutanol are converted by exogenously encoded enzymes.

[0029] In one embodiment, one or more of the isobutanol pathway genes encodes an enzyme that is localized to the cytosol. In one embodiment, the recombinant microorganisms comprise an isobutanol producing metabolic pathway with at least one isobutanol pathway enzyme localized in the cytosol. In another embodiment, the recombinant microorganisms comprise an isobutanol producing metabolic pathway with at least two isobutanol pathway enzymes localized in the cytosol. In yet another embodiment, the recombinant microorganisms comprise an isobutanol producing metabolic pathway with at least three isobutanol pathway enzymes localized in the cytosol. In yet another embodiment, the recombinant microorganisms comprise an isobutanol producing metabolic pathway with at least four isobutanol pathway enzymes localized in the cytosol. In an exemplary embodiment, the recombinant microorganisms comprise an isobutanol producing metabolic pathway with five isobutanol pathway enzymes localized in the cytosol. In yet another exemplary embodiment, the recombinant microorganisms comprise an isobutanol producing metabolic pathway with all isobutanol pathway enzymes localized in the cytosol. In a further exemplary embodiment, at least one of the pathway enzymes localized to the cytosol is a cytosolically active DHAD enzyme as disclosed herein.

[0030] In various embodiments described herein, the isobutanol pathway genes may encode enzyme(s) selected from the group consisting of acetolactate synthase (ALS), ketol-acid reductoisomerase (KARI), dihydroxyacid dehydratase (DHAD), 2-keto-acid decarboxylase, e.g., keto-isovalerate decarboxylase (KIVD), and alcohol dehydrogenase (ADH).

[0031] Another aspect of the invention is directed to a recombinant microorganism comprising a DHAD-requiring biosynthetic pathway, wherein said microorganism has been engineered to overexpress a polynucleotide encoding Grx3 and/or Grx4 or a homolog thereof. In one embodiment, the polynucleotide encoding the Grx protein or homolog thereof is native to the recombinant microorganism. In another embodiment, the polynucleotide encoding the Grx protein or homolog thereof is heterologous to the recombinant microorganism.

[0032] In various embodiments described herein, the recombinant microorganism may be engineered reduce the concentration of reactive oxygen species (ROS) in the recombinant microorganism. Thus, the recombinant microorganisms may be engineered to express one or more proteins that reduce the concentration of reactive oxygen species (ROS) in said cell. The proteins to be expressed for reducing the concentration of reactive oxygen species may be selected from catalases, superoxide dismutases, metallothioneins, and methionine sulphoxide reductases. In a specific embodiment, said catalase may be encoded by one of more of the genes selected from the group consisting of the E. coli genes katG and katE, the S. cerevisiae genes CTT1 and CTA1, or homologs thereof. In another specific embodiment, said superoxide dismutase is encoded by one of more of the genes selected from the group consisting of the E. coli genes sodA, sodB, sodC, the S. cerevisiae genes SOD1 and SOD2, or homologs thereof. In another specific embodiment, said metallothionein is encoded by one of more of the genes selected from the group consisting of the S. cerevisiae CUP1-1 and CUP1-2 genes or homologs thereof. In another specific embodiment, said metallothionein is encoded by one or more genes selected from the group consisting of the Mycobacterium tuberculosis MymT gene and the Synechococcus PCC 7942 SmtA gene or homologs thereof. In another specific embodiment, said methionine sulphoxide reductase is encoded by one or more genes selected from the group consisting of the S. cerevisiae genes MXR1 and MXR2, or homologs thereof.

[0033] In some embodiments, the recombinant microorganism may be engineered to increase the level of available glutathione in the recombinant microorganism. Thus, the recombinant microorganisms may be engineered to express one or more proteins that increase the level of available glutathione in the cell. In one embodiment, the proteins are selected from glutaredoxin, glutathione reductase, glutathione synthase, and combinations thereof. In a specific embodiment, said glutaredoxin is encoded by one of more of the genes selected from the group the S. cerevisiae genes GRX2, GRX4, GRX6, and GRX7, or homologs thereof. In another specific embodiment, said glutathione reductase is encoded by the S. cerevisiae genes GLR1 or homologs thereof. In another specific embodiment, said glutathione synthase is encoded by one of more of the genes selected from the S. cerevisiae genes GSH1 and GSH2, or homologs thereof. In some embodiments, two enzymes are expressed to increase the level of available glutathione in the cell. In one embodiment, the enzymes are γ-glutamyl cysteine synthase and glutathione synthase. In a specific embodiment, said glutathione synthase is encoded by one of more of the genes selected from the group the S. cerevisiae genes GSH1 and GSH2, or homologs thereof.

[0034] In some embodiments, it may be desirable to overexpress one or more functional components of the thioredoxin system, as overexpression of the functional components of the thioredoxin system can increase the amount of bioavailable thioredoxin. In one embodiment, the functional components of the thioredoxin system may be selected from a thioredoxin and a thioredoxin reductase. In a specific embodiment, said thioredoxin is encoded by the S. cerevisiae TRX1 and TRX2 genes or homologs thereof. In another specific embodiment, said thioredoxin reductase is encoded by S. cerevisiae TRR1 gene or homologs thereof. In additional embodiments, the recombinant microorganism may further be engineered to overexpress the mitochondrial thioredoxin system. In one embodiment, the mitochondrial thioredoxin system is comprised of the mitochondrial thioredoxin and mitochondrial thioredoxin reductase. In a specific embodiment, said mitochondrial thioredoxin is encoded by the S. cerevisiae TRX3 gene or homologs thereof. In another specific embodiment, said mitochondrial thioredoxin reductase is encoded by the S. cerevisiae TRR2 gene or homologs thereof.

[0035] In various embodiments described herein, it may be desirable to engineer the recombinant microorganism to overexpress one or more mitochondrial export proteins. In a specific embodiment, said mitochondrial export protein may be selected from the group consisting of the S. cerevisiae ATM1, the S. cerevisiae ERV1, and the S. cerevisiae BAT1, or homologs thereof.

[0036] In addition, the present invention provides recombinant microorganisms that have been engineered to increase the inner mitochondrial membrane electrical potential, Δψ_{M}. In one embodiment, this is accomplished via overexpression of an ATP/ADP carrier protein, wherein said overexpression increases ATP⁴⁻ import into the mitochondrial matrix in exchange for ADP³⁻. In a specific embodiment, said ATP/ADP carrier protein is encoded by the S. cerevisiae AAC1, AAC2, and/or AAC3 genes or homologs thereof. In another embodiment, the inner mitochondrial membrane electrical potential, Δψ_{M} is increased via a mutation in the mitochondrial ATP synthase complex that increases ATP hydrolysis activity. In a specific embodiment, said mutation is an ATP1-111 suppressor mutation or a corresponding mutation in a homologous protein.

[0037] In various embodiments described herein, it may further be desirable to engineer the recombinant microorganism to express one or more enzymes in the cytosol that reduce the concentration of reactive nitrogen species (RNS) and/or nitric oxide (NO) in said cytosol. In one embodiment, said one or more enzymes are selected from the group consisting of nitric oxide reductases and glutathione-S-nitrosothiol reductase. In a specific embodiment, said nitric oxide reductase is encoded by one of more of the genes selected from the group consisting of the E. coli gene norV and the Fusarium oxysporum gene P-450dNIR, or homologs thereof. In another specific embodiment, said glutathione-S-nitrosothiol reductase is encoded by the S. cerevisiae gene SFA1 or homologs thereof. In one embodiment, said glutathione-S-nitrosothiol reductase gene SFA1 is overexpressed. In another specific embodiment, said one or more enzymes is encoded by a gene selected from the group consisting of the E. coli gene ytfE, the Staphylococcus aureus gene scdA, and Neisseria gonorrhoeae gene dnrN, or homologs thereof.

[0038] Also provided herein are recombinant microorganisms that demonstrate increased the levels of sulfur-containing compounds within yeast cells, including the amino acid cysteine, such that this sulfur is more available for the production of iron-sulfur cluster-containing proteins in the yeast cell. In one embodiment, the recombinant microorganism has been engineered to overexpress one or more of the genes selected from the S. cerevisiae genes MET1, MET2, MET3, MET5, MET8, MET10, MET14, MET16, MET17, HOM2, HOM3, HOME, CYS3, CYS4, SUL1, and SUL2, or homologs thereof. The recombinant microorganism may additionally or optionally also overexpress one or more of the genes selected from the S. cerevisiae genes YCT1, MUP1, GAP1, AGP1, GNP1, BAP1, BAP2, TAT1, and TAT2, or homologs thereof.

[0039] In various embodiments described herein, the recombinant microorganism may exhibit at least about 5 percent greater dihydroxyacid dehydratase (DHAD) activity as compared to the parental microorganism. In another embodiment, the recombinant microorganism may exhibit at least about 10 percent, at least about 15 percent, about least about 20 percent, at least about 25 percent, at least about 30 percent, at least about 35 percent, at least about 40 percent, at least about 45 percent, at least about 50 percent, at least about 55 percent, at least about 60 percent, at least about 65 percent, at least about 70 percent, at least about 75 percent, at least about 80 percent, at least about 100 percent, at least about 200 percent, or at least about 500 percent greater dihydroxyacid dehydratase (DHAD) activity as compared to the parental microorganism.

[0040] In various embodiments described herein, the recombinant microorganisms may be microorganisms of the Saccharomyces clade, Saccharomyces sensu stricto microorganisms, Crabtree-negative yeast microorganisms, Crabtree-positive yeast microorganisms, post-WGD (whole genome duplication) yeast microorganisms, pre-WGD (whole genome duplication) yeast microorganisms, and non-fermenting yeast microorganisms.

[0041] In some embodiments, the recombinant microorganisms may be yeast recombinant microorganisms of the Saccharomyces clade.

[0042] In some embodiments, the recombinant microorganisms may be Saccharomyces sensu stricto microorganisms. In one embodiment, the Saccharomyces sensu stricto is selected from the group consisting of S. cerevisiae, S. kudriavzevii, S. mikatae, S. bayanus, S. uvarum. S. carocanis and hybrids thereof.

[0043] In some embodiments, the recombinant microorganisms may be Crabtree-negative recombinant yeast microorganisms. In one embodiment, the Crabtree-negative yeast microorganism is classified into a genera selected from the group consisting of Kluyveromyces, Pichia, Issatchenkia, Hansenula, or Candida. In additional embodiments, the Crabtree-negative yeast microorganism is selected from Kluyveromyces lactis, Kluyveromyces marxianus, Pichia anomala, Pichia stipitis, Hansenula anomala, Candida utilis and Kluyveromyces waltii.

[0044] In some embodiments, the recombinant microorganisms may be Crabtree-positive recombinant yeast microorganisms. In one embodiment, the Crabtree-positive yeast microorganism is classified into a genera selected from the group consisting of Saccharomyces, Kluyveromyces, Zygosaccharomyces, Debaryomyces, Candida, Pichia and Schizosaccharomyces. In additional embodiments, the Crabtree-positive yeast microorganism is selected from the group consisting of Saccharomyces cerevisiae, Saccharomyces uvarum, Saccharomyces bayanus, Saccharomyces paradoxus, Saccharomyces castelli, Saccharomyces kluyveri, Kluyveromyces thermotolerans, Candida glabrata, Z. bailli, Z. rouxii, Debaryomyces hansenii, Pichia pastorius, Schizosaccharomyces pombe, and Saccharomyces uvarum.

[0045] In some embodiments, the recombinant microorganisms may be post-WGD (whole genome duplication) yeast recombinant microorganisms. In one embodiment, the post-WGD yeast recombinant microorganism is classified into a genera selected from the group consisting of Saccharomyces or Candida. In additional embodiments, the post-WGD yeast is selected from the group consisting of Saccharomyces cerevisiae, Saccharomyces uvarum, Saccharomyces bayanus, Saccharomyces paradoxus, Saccharomyces castelli, and Candida glabrata.

[0046] In some embodiments, the recombinant microorganisms may be pre-WGD (whole genome duplication) yeast recombinant microorganisms. In one embodiment, the pre-WGD yeast recombinant microorganism is classified into a genera selected from the group consisting of Saccharomyces, Kluyveromyces, Candida, Pichia, Issatchenkia, Debaryomyces, Hansenula, Pachysolen, Yarrowia and Schizosaccharomyces. In additional embodiments, the pre-WGD yeast is selected from the group consisting of Saccharomyces kluyveri, Kluyveromyces thermotolerans, Kluyveromyces marxianus, Kluyveromyces waltii, Kluyveromyces lactis, Candida tropicalis, Pichia pastoris, Pichia anomala, Pichia stipitis, Isstachenkia orientalis, Issatchenkia occidentalis, Debaryomyces hansenii, Hansenula anomala, Pachysolen tannophilis, Yarrowia lipolytica, and Schizosaccharomyces pombe.

[0047] In some embodiments, the recombinant microorganisms may be microorganisms that are non-fermenting yeast microorganisms, including, but not limited to those, classified into a genera selected from the group consisting of Tricosporon, Rhodotorula, Myxozyma, or Candida. In a specific embodiment, the non-fermenting yeast is C. xestobii.

[0048] In another aspect, the present invention provides methods of producing beneficial metabolites including fuels, chemicals, and amino acids using a recombinant microorganism as described herein. In one embodiment, the method includes cultivating the recombinant microorganism in a culture medium containing a feedstock providing the carbon source until a recoverable quantity of the metabolite is produced and optionally, recovering the metabolite. In one embodiment, the microorganism produces the metabolite from a carbon source at a yield of at least about 5 percent theoretical. In another embodiment, the microorganism produces the metabolite at a yield of at least about 10 percent, at least about 15 percent, about least about 20 percent, at least about 25 percent, at least about 30 percent, at least about 35 percent, at least about 40 percent, at least about 45 percent, at least about 50 percent, at least about 55 percent, at least about 60 percent, at least about 65 percent, at least about 70 percent, at least about 75 percent, at least about 80 percent, at least about 85 percent, at least about 90 percent, at least about 95 percent, or at least about 97.5 percent theoretical. The metabolite may be derived from any DHAD-requiring biosynthetic pathway, including, but not limited to, biosynthetic pathways for the production of isobutanol, 3-methyl-1-butanol, 2-methyl-1-butanol, valine, isoleucine, leucine, and pantothenic acid.

[0049] In one embodiment, the recombinant microorganism converts the carbon source to isobutanol under aerobic conditions. In another embodiment, the recombinant microorganism converts the carbon source to isobutanol under microaerobic conditions. In yet another embodiment, the recombinant microorganism converts the carbon source to isobutanol under anaerobic conditions.

### BRIEF DESCRIPTION OF DRAWINGS

[0050] Illustrative embodiments of the invention are illustrated in the drawings, in which:

[0051] FIG. 1 illustrates an exemplary embodiment of an isobutanol pathway.

[0052] FIG. 2 illustrates an exemplary embodiment of an NADH-dependent isobutanol pathway.

[0053] FIG. 3 illustrates a phylogenetic tree of DHAD proteins. Numbers at nodes indicate bootstrap values. Ec_ilvD is a known 4Fe-4S DHAD enzyme from Escherichia coli.

[0054] FIG. 4 illustrates a S. cerevisiae AFT1-1^{UP} allelic exchange construct.

[0055] FIG. 5 illustrates a S. cerevisiae AFT2-1^{UP} allelic exchange construct.

[0056] FIG. 6 illustrates a linear DNA fragment containing the K. marxianus AFT, the L. lactis DHAD, and a G418 resistance marker.

[0057] FIG. 7 illustrates a linear DNA fragment containing the L. lactis DHAD and a G418 resistance marker.

[0058] FIG. 8 illustrates a plasmid map for pGV2196, comprising TEF1 and TDH3 promoters for use in the overexpression of NFS1 and/or ISD11

[0059] FIG. 9 illustrates a plasmid map for pGV2964, incorporated into S. cerevisiae strain GEVO6014.

[0060] FIG. 10 illustrates the total isobutanol titers [g/L] of yeast strains engineered to overexpress NFS1 and/or ISD11.

[0061] FIG. 11 illustrates the isobutanol specific titers [g/g CDW] of yeast strains engineered to overexpress NFS1 and/or ISD11.

[0062] FIG. 12 illustrates the total isobutanol titer [g/L] of a yeast strain engineered to overexpress NFS1 and ISD11 as compared to a control strain with an empty vector.

[0063] FIG. 13 illustrates the specific isobutanol titer [g/g CDW] of a yeast strain engineered to overexpress NFS1 and ISD11 as compared to a control strain with an empty vector.

[0064] FIG. 14 illustrates the total isobutanol titers [g/L] of yeast strains engineered to overexpress NFS1 and/or ISD11 at 24 hr and 48 hr.

[0065] FIG. 15 illustrates the specific isobutanol titers [g/g CDW] of yeast strains engineered to overexpress NFS1 and/or ISD11 at 24 hr and 48 hr.

[0066] FIG. 16 illustrates the results of DHAD activity assays in yeast strains engineered to overexpress NFS1 and/or ISD11.

### DETAILED DESCRIPTION

[0067] As used herein and in the appended claims, the singular forms “a,” “an,” and “the” include plural referents unless the context clearly dictates otherwise. Thus, for example, reference to “a polynucleotide” includes a plurality of such polynucleotides and reference to “the microorganism” includes reference to one or more microorganisms, and so forth.

[0068] Unless defined otherwise, all technical and scientific terms used herein have the same meaning as commonly understood to one of ordinary skill in the art to which this disclosure belongs. Although methods and materials similar or equivalent to those described herein can be used in the practice of the disclosed methods and compositions, the exemplary methods, devices and materials are described herein.

[0069] Any publications discussed above and throughout the text are provided solely for their disclosure prior to the filing date of the present application. Nothing herein is to be construed as an admission that the inventors are not entitled to antedate such disclosure by virtue of prior disclosure.

[0070] The term “microorganism” includes prokaryotic and eukaryotic microbial species from the Domains Archaea, Bacteria and Eucarya, the latter including yeast and filamentous fungi, protozoa, algae, or higher Protista. The terms “microbial cells” and “microbes” are used interchangeably with the term microorganism.

[0071] The term “genus” is defined as a taxonomic group of related species according to the Taxonomic Outline of Bacteria and Archaea (Garrity, G. M., Lilburn, T. G., Cole, J. R., Harrison, S. H., Euzeby, J., and Tindall, B. J. (2007) The Taxonomic Outline of Bacteria and Archaea. TOBA Release 7.7, March 2007. Michigan State University Board of Trustees.

[0072] The term “species” is defined as a collection of closely related organisms with greater than 97% 16S ribosomal RNA sequence homology and greater than 70% genomic hybridization and sufficiently different from all other organisms so as to be recognized as a distinct unit.

[0073] The terms “recombinant microorganism,” “modified microorganism,” and “recombinant host cell” are used interchangeably herein and refer to microorganisms that have been genetically modified to express or to overexpress endogenous polynucleotides, to express heterologous polynucleotides, such as those included in a vector, in an integration construct, or which have an alteration in expression of an endogenous gene. By “alteration” it is meant that the expression of the gene, or level of a RNA molecule or equivalent RNA molecules encoding one or more polypeptides or polypeptide subunits, or activity of one or more polypeptides or polypeptide subunits is up regulated or down regulated, such that expression, level, or activity is greater than or less than that observed in the absence of the alteration. For example, the term “alter” can mean “inhibit,” but the use of the word “alter” is not limited to this definition. It is understood that the terms “recombinant microorganism” and “recombinant host cell” refer not only to the particular recombinant microorganism but to the progeny or potential progeny of such a microorganism. Because certain modifications may occur in succeeding generations due to either mutation or environmental influences, such progeny may not, in fact, be identical to the parent cell, but are still included within the scope of the term as used herein.

[0074] The term “expression” with respect to a gene sequence refers to transcription of the gene and, as appropriate, translation of the resulting mRNA transcript to a protein. Thus, as will be clear from the context, expression of a protein results from transcription and translation of the open reading frame sequence. The level of expression of a desired product in a host cell may be determined on the basis of either the amount of corresponding mRNA that is present in the cell, or the amount of the desired product encoded by the selected sequence. For example, mRNA transcribed from a selected sequence can be quantitated by qRT-PCR or by Northern hybridization (see Sambrook et al., Molecular Cloning: A Laboratory Manual, Cold Spring Harbor Laboratory Press (1989)). Protein encoded by a selected sequence can be quantitated by various methods, e.g., by ELISA, by assaying for the biological activity of the protein, or by employing assays that are independent of such activity, such as western blotting or radioimmunoassay, using antibodies that recognize and bind the protein. See Sambrook et al., 1989, supra.

[0075] The term “overexpression” refers to an elevated level (e.g., aberrant level) of mRNAs encoding for a protein(s) (e.g. an Nfs1 or Isd11 protein or homolog thereof), and/or to elevated levels of protein(s) (e.g. Nfs1 or Isd11) in cells as compared to similar corresponding unmodified cells expressing basal levels of mRNAs (e.g., those encoding Nfs1 or Isd11 proteins) or having basal levels of proteins. In particular embodiments, Nfs1 and/or Isd11, or homologs thereof, may be overexpressed by at least 2-fold, 3-fold, 4-fold, 5-fold, 6-fold, 8-fold, 10-fold, 12-fold, 15-fold or more in microorganisms engineered to exhibit increased Nfs1 and/or Isd11 mRNA, protein, and/or activity.

[0076] As used herein and as would be understood by one of ordinary skill in the art, “reduced activity and/or expression” of a protein such as an enzyme can mean either a reduced specific catalytic activity of the protein (e.g. reduced activity) and/or decreased concentrations of the protein in the cell (e.g. reduced expression).

[0077] The term “wild-type microorganism” describes a cell that occurs in nature, i.e., a cell that has not been genetically modified. A wild-type microorganism can be genetically modified to express or overexpress a first target enzyme. This microorganism can act as a parental microorganism in the generation of a microorganism modified to express or overexpress a second target enzyme. In turn, the microorganism modified to express or overexpress a first and a second target enzyme can be modified to express or overexpress a third target enzyme.

[0078] Accordingly, a “parental microorganism” functions as a reference cell for successive genetic modification events. Each modification event can be accomplished by introducing a nucleic acid molecule in to the reference cell. The introduction facilitates the expression or overexpression of a target enzyme. It is understood that the term “facilitates” encompasses the activation of endogenous polynucleotides encoding a target enzyme through genetic modification of e.g., a promoter sequence in a parental microorganism. It is further understood that the term “facilitates” encompasses the introduction of heterologous polynucleotides encoding a target enzyme in to a parental microorganism.

[0079] The term “engineer” refers to any manipulation of a microorganism that results in a detectable change in the microorganism, wherein the manipulation includes but is not limited to inserting a polynucleotide and/or polypeptide heterologous to the microorganism and mutating a polynucleotide and/or polypeptide native to the microorganism.

[0080] The term “mutation” as used herein indicates any modification of a nucleic acid and/or polypeptide which results in an altered nucleic acid or polypeptide. Mutations include, for example, point mutations, deletions, or insertions of single or multiple residues in a polynucleotide, which includes alterations arising within a protein-encoding region of a gene as well as alterations in regions outside of a protein-encoding sequence, such as, but not limited to, regulatory or promoter sequences. A genetic alteration may be a mutation of any type. For instance, the mutation may constitute a point mutation, a frame-shift mutation, an insertion, or a deletion of part or all of a gene. In addition, in some embodiments of the modified microorganism, a portion of the microorganism genome has been replaced with a heterologous polynucleotide. In some embodiments, the mutations are naturally-occurring. In other embodiments, the mutations are the results of artificial selection pressure. In still other embodiments, the mutations in the microorganism genome are the result of genetic engineering.

[0081] The term “biosynthetic pathway”, also referred to as “metabolic pathway”, refers to a set of anabolic or catabolic biochemical reactions for converting one chemical species into another. Gene products belong to the same “metabolic pathway” if they, in parallel or in series, act on the same substrate, produce the same product, or act on or produce a metabolic intermediate (i.e., metabolite) between the same substrate and metabolite end product.

[0082] As used herein, the term “isobutanol producing metabolic pathway” refers to an enzyme pathway which produces isobutanol from pyruvate.

[0083] The term “NADH-dependent” as used herein with reference to an enzyme, e.g., KARI and/or ADH, refers to an enzyme that catalyzes the reduction of a substrate coupled to the oxidation of NADH with a catalytic efficiency that is greater than the reduction of the same substrate coupled to the oxidation of NADPH at equal substrate and cofactor concentrations.

[0084] The term “exogenous” as used herein with reference to various molecules, e.g., polynucleotides, polypeptides, enzymes, etc., refers to molecules that are not normally or naturally found in and/or produced by a given yeast, bacterium, organism, microorganism, or cell in nature.

[0085] On the other hand, the term “endogenous” or “native” as used herein with reference to various molecules, e.g., polynucleotides, polypeptides, enzymes, etc., refers to molecules that are normally or naturally found in and/or produced by a given yeast, bacterium, organism, microorganism, or cell in nature.

[0086] The term “heterologous” as used herein in the context of a modified host cell refers to various molecules, e.g., polynucleotides, polypeptides, enzymes, etc., wherein at least one of the following is true: (a) the molecule(s) is/are foreign (“exogenous”) to (i.e., not naturally found in) the host cell; (b) the molecule(s) is/are naturally found in (e.g., is “endogenous to”) a given host microorganism or host cell but is either produced in an unnatural location or in an unnatural amount in the cell; and/or (c) the molecule(s) differ(s) in nucleotide or amino acid sequence from the endogenous nucleotide or amino acid sequence(s) such that the molecule differing in nucleotide or amino acid sequence from the endogenous nucleotide or amino acid as found endogenously is produced in an unnatural (e.g., greater than naturally found) amount in the cell.

[0087] The term “feedstock” is defined as a raw material or mixture of raw materials supplied to a microorganism or fermentation process from which other products can be made. For example, a carbon source, such as biomass or the carbon compounds derived from biomass are a feedstock for a microorganism that produces a biofuel in a fermentation process. However, a feedstock may contain nutrients other than a carbon source.

[0088] The term “substrate” or “suitable substrate” refers to any substance or compound that is converted or meant to be converted into another compound by the action of an enzyme. The term includes not only a single compound, but also combinations of compounds, such as solutions, mixtures and other materials which contain at least one substrate, or derivatives thereof. Further, the term “substrate” encompasses not only compounds that provide a carbon source suitable for use as a starting material, such as any biomass derived sugar, but also intermediate and end product metabolites used in a pathway associated with a recombinant microorganism as described herein.

[0089] The term “C2-compound” as used as a carbon source for engineered yeast microorganisms with mutations in all pyruvate decarboxylase (PDC) genes resulting in a reduction of pyruvate decarboxylase activity of said genes refers to organic compounds comprised of two carbon atoms, including but not limited to ethanol and acetate.

[0090] The term “fermentation” or “fermentation process” is defined as a process in which a microorganism is cultivated in a culture medium containing raw materials, such as feedstock and nutrients, wherein the microorganism converts raw materials, such as a feedstock, into products.

[0091] The term “volumetric productivity” or “production rate” is defined as the amount of product formed per volume of medium per unit of time. Volumetric productivity is reported in gram per liter per hour (g/L/h).

[0092] The term “specific productivity” or “specific production rate” is defined as the amount of product formed per volume of medium per unit of time per amount of cells. Specific productivity is reported in gram (or milligram) per gram cell dry weight per hour (g/g h).

[0093] The term “yield” is defined as the amount of product obtained per unit weight of raw material and may be expressed as g product per g substrate (g/g). Yield may be expressed as a percentage of the theoretical yield. “Theoretical yield” is defined as the maximum amount of product that can be generated per a given amount of substrate as dictated by the stoichiometry of the metabolic pathway used to make the product. For example, the theoretical yield for one typical conversion of glucose to isobutanol is 0.41 g/g. As such, a yield of isobutanol from glucose of 0.39 g/g would be expressed as 95% of theoretical or 95% theoretical yield.

[0094] The term “titer” is defined as the strength of a solution or the concentration of a substance in solution. For example, the titer of a biofuel in a fermentation broth is described as g of biofuel in solution per liter of fermentation broth (g/L).

[0095] “Aerobic conditions” are defined as conditions under which the oxygen concentration in the fermentation medium is sufficiently high for an aerobic or facultative anaerobic microorganism to use as a terminal electron acceptor.

[0096] In contrast, “anaerobic conditions” are defined as conditions under which the oxygen concentration in the fermentation medium is too low for the microorganism to use as a terminal electron acceptor. Anaerobic conditions may be achieved by sparging a fermentation medium with an inert gas such as nitrogen until oxygen is no longer available to the microorganism as a terminal electron acceptor. Alternatively, anaerobic conditions may be achieved by the microorganism consuming the available oxygen of the fermentation until oxygen is unavailable to the microorganism as a terminal electron acceptor. Methods for the production of isobutanol under anaerobic conditions are described in commonly owned and co-pending publication, US 2010/0143997, the disclosures of which are herein incorporated by reference in its entirety for all purposes.

[0097] “Aerobic metabolism” refers to a biochemical process in which oxygen is used as a terminal electron acceptor to make energy, typically in the form of ATP, from carbohydrates. Aerobic metabolism occurs e.g. via glycolysis and the TCA cycle, wherein a single glucose molecule is metabolized completely into carbon dioxide in the presence of oxygen.

[0098] In contrast, “anaerobic metabolism” refers to a biochemical process in which oxygen is not the final acceptor of electrons contained in NADH. Anaerobic metabolism can be divided into anaerobic respiration, in which compounds other than oxygen serve as the terminal electron acceptor, and substrate level phosphorylation, in which the electrons from NADH are utilized to generate a reduced product via a “fermentative pathway.”

[0099] In “fermentative pathways”, NAD(P)H donates its electrons to a molecule produced by the same metabolic pathway that produced the electrons carried in NAD(P)H. For example, in one of the fermentative pathways of certain yeast strains, NAD(P)H generated through glycolysis transfers its electrons to pyruvate, yielding ethanol. Fermentative pathways are usually active under anaerobic conditions but may also occur under aerobic conditions, under conditions where NADH is not fully oxidized via the respiratory chain. For example, above certain glucose concentrations, Crabtree-positive yeasts produce large amounts of ethanol under aerobic conditions.

[0100] The term “byproduct” or “by-product” means an undesired product related to the production of an amino acid, amino acid precursor, chemical, chemical precursor, biofuel, or biofuel precursor.

[0101] The term “substantially free” when used in reference to the presence or absence of a protein activity (3-KAR enzymatic activity, ALDH enzymatic activity, PDC enzymatic activity, GPD enzymatic activity, etc.) means the level of the protein is substantially less than that of the same protein in the wild-type host, wherein less than about 50% of the wild-type level is preferred and less than about 30% is more preferred. The activity may be less than about 20%, less than about 10%, less than about 5%, or less than about 1% of wild-type activity. Microorganisms which are “substantially free” of a particular protein activity (3-KAR enzymatic activity, ALDH enzymatic activity, PDC enzymatic activity, GPD enzymatic activity, etc.) may be created through recombinant means or identified in nature.

[0102] The term “non-fermenting yeast” is a yeast species that fails to demonstrate an anaerobic metabolism in which the electrons from NADH are utilized to generate a reduced product via a fermentative pathway such as the production of ethanol and CO₂ from glucose. Non-fermentative yeast can be identified by the “Durham Tube Test” (J. A. Barnett, R. W. Payne, and D. Yarrow. 2000. Yeasts Characteristics and Identification. 3^{rd} edition. p. 28-29. Cambridge University Press, Cambridge, UK.) or by monitoring the production of fermentation productions such as ethanol and CO₂

[0103] The term “polynucleotide” is used herein interchangeably with the term “nucleic acid” and refers to an organic polymer composed of two or more monomers including nucleotides, nucleosides or analogs thereof, including but not limited to single stranded or double stranded, sense or antisense deoxyribonucleic acid (DNA) of any length and, where appropriate, single stranded or double stranded, sense or antisense ribonucleic acid (RNA) of any length, including siRNA. The term “nucleotide” refers to any of several compounds that consist of a ribose or deoxyribose sugar joined to a purine or a pyrimidine base and to a phosphate group, and that are the basic structural units of nucleic acids. The term “nucleoside” refers to a compound (as guanosine or adenosine) that consists of a purine or pyrimidine base combined with deoxyribose or ribose and is found especially in nucleic acids. The term “nucleotide analog” or “nucleoside analog” refers, respectively, to a nucleotide or nucleoside in which one or more individual atoms have been replaced with a different atom or with a different functional group. Accordingly, the term polynucleotide includes nucleic acids of any length, DNA, RNA, analogs and fragments thereof. A polynucleotide of three or more nucleotides is also called nucleotidic oligomer or oligonucleotide.

[0104] It is understood that the polynucleotides described herein include “genes” and that the nucleic acid molecules described herein include “vectors” or “plasmids.” Accordingly, the term “gene”, also called a “structural gene” refers to a polynucleotide that codes for a particular sequence of amino acids, which comprise all or part of one or more proteins or enzymes, and may include regulatory (non-transcribed) DNA sequences, such as promoter sequences, which determine for example the conditions under which the gene is expressed. The transcribed region of the gene may include untranslated regions, including introns, 5′-untranslated region (UTR), and 3′-UTR, as well as the coding sequence.

[0105] The term “operon” refers to two or more genes which are transcribed as a single transcriptional unit from a common promoter. In some embodiments, the genes comprising the operon are contiguous genes. It is understood that transcription of an entire operon can be modified (i.e., increased, decreased, or eliminated) by modifying the common promoter. Alternatively, any gene or combination of genes in an operon can be modified to alter the function or activity of the encoded polypeptide. The modification can result in an increase in the activity of the encoded polypeptide. Further, the modification can impart new activities on the encoded polypeptide. Exemplary new activities include the use of alternative substrates and/or the ability to function in alternative environmental conditions.

[0106] A “vector” is any means by which a nucleic acid can be propagated and/or transferred between organisms, cells, or cellular components. Vectors include viruses, bacteriophage, pro-viruses, plasmids, phagemids, transposons, and artificial chromosomes such as YACs (yeast artificial chromosomes), BACs (bacterial artificial chromosomes), and PLACs (plant artificial chromosomes), and the like, that are “episomes,” that is, that replicate autonomously or can integrate into a chromosome of a host cell. A vector can also be a naked RNA polynucleotide, a naked DNA polynucleotide, a polynucleotide composed of both DNA and RNA within the same strand, a poly-lysine-conjugated DNA or RNA, a peptide-conjugated DNA or RNA, a liposome-conjugated DNA, or the like, that are not episomal in nature, or it can be an organism which comprises one or more of the above polynucleotide constructs such as an agrobacterium or a bacterium.

[0107] “Transformation” refers to the process by which a vector is introduced into a host cell. Transformation (or transduction, or transfection), can be achieved by any one of a number of means including chemical transformation (e.g. lithium acetate transformation), electroporation, microinjection, biolistics (or particle bombardment-mediated delivery), or agrobacterium mediated transformation.

[0108] The term “enzyme” as used herein refers to any substance that catalyzes or promotes one or more chemical or biochemical reactions, which usually includes enzymes totally or partially composed of a polypeptide, but can include enzymes composed of a different molecule including polynucleotides.

[0109] The term “protein,” “peptide,” or “polypeptide” as used herein indicates an organic polymer composed of two or more amino acidic monomers and/or analogs thereof. As used herein, the term “amino acid” or “amino acidic monomer” refers to any natural and/or synthetic amino acids including glycine and both D or L optical isomers. The term “amino acid analog” refers to an amino acid in which one or more individual atoms have been replaced, either with a different atom, or with a different functional group. Accordingly, the term polypeptide includes amino acidic polymer of any length including full length proteins, and peptides as well as analogs and fragments thereof. A polypeptide of three or more amino acids is also called a protein oligomer or oligopeptide.

[0110] The term “homolog,” used with respect to an original enzyme or gene of a first family or species, refers to distinct enzymes or genes of a second family or species which are determined by functional, structural or genomic analyses to be an enzyme or gene of the second family or species which corresponds to the original enzyme or gene of the first family or species. Most often, homologs will have functional, structural or genomic similarities. Techniques are known by which homologs of an enzyme or gene can readily be cloned using genetic probes and PCR. Identity of cloned sequences as homolog can be confirmed using functional assays and/or by genomic mapping of the genes.

[0111] A protein has “homology” or is “homologous” to a second protein if the amino acid sequence encoded by a gene has a similar amino acid sequence to that of the second gene. Alternatively, a protein has homology to a second protein if the two proteins have “similar” amino acid sequences. (Thus, the term “homologous proteins” is defined to mean that the two proteins have similar amino acid sequences).

[0112] The term “analog” or “analogous” refers to nucleic acid or protein sequences or protein structures that are related to one another in function only and are not from common descent or do not share a common ancestral sequence. Analogs may differ in sequence but may share a similar structure, due to convergent evolution. For example, two enzymes are analogs or analogous if the enzymes catalyze the same reaction of conversion of a substrate to a product, are unrelated in sequence, and irrespective of whether the two enzymes are related in structure.

Enhancing DHAD Activity by Increasing Nfs1/Isd11 Expression and/or Activity

[0113] The present inventors have found that altering the expression of the NFS1 and ISD11 genes of S. cerevisiae increases DHAD activity and contributes to increased isobutanol titers, productivity, and yield in strains comprising DHAD as part of an isobutanol-producing metabolic pathway. The observed increases in DHAD activity resulting from the increased expression of NFS1 and/or ISD11 therefore has broad applicability to any DHAD-requiring biosynthetic pathway, as DHAD activity is often a rate-limiting component of such pathways.

[0114] Accordingly, one aspect of the invention is directed to a recombinant microorganism comprising a DHAD-requiring biosynthetic pathway, wherein said microorganism is engineered to overexpress one or more polynucleotides encoding one or more Nfs1 proteins or homologs thereof and/or one or more polynucleotides encoding one or more Isd11 proteins or homologs thereof.

[0115] As used herein, a “DHAD-requiring biosynthetic pathway” refers to any metabolic pathway which utilizes DHAD to convert 2,3-dihydroxyisovalerate to α-ketoisovalerate or 2,3-dihydroxy-3-methylvalerate to 2-keto-3-methylvalerate. Examples of DHAD-requiring biosynthetic pathways include, but are not limited to, isobutanol, 3-methyl-1-butanol, 2-methyl-1-butanol, valine, isoleucine, leucine, and pantothenic acid (vitamin B5) metabolic pathways. The metabolic pathway may naturally occur in a microorganism (e.g., a natural pathway for the production of valine) or arise from the introduction of one or more heterologous polynucleotides through genetic engineering. In one embodiment, the recombinant microorganisms expressing the DHAD-requiring biosynthetic pathway are yeast cells. Engineered biosynthetic pathways for synthesis of isobutanol are described in commonly owned and co-pending applications U.S. Ser. No. 12/343,375 (published as US 2009/0226991), U.S. Ser. No. 12/610,784 (published as US 2010/0143997), U.S. Ser. No. 12/696,645, U.S. Ser. No. 12/820,505 (published as US 2011/0020889), U.S. Ser. No. 12/855,276, U.S. Ser. No. 12/953,884, PCT/US09/62952 (published as WO/2010/051527), and PCT/US09/69390 (published as WO/2010/075504), all of which are herein incorporated by reference in their entireties for all purposes. Additional DHAD-requiring biosynthetic pathways have been described for the synthesis of valine, leucine, and isoleucine (See, e.g., WO/2001/021772, and McCourt et al., 2006, Amino Acids 31: 173-210), pantothenic acid (See, e.g., WO/2001/021772), 3-methyl-1-butanol (See, e.g., WO/2008/098227, Atsumi et al., 2008, Nature 451: 86-89, and Connor et al., 2008, Appl. Environ. Microbiol. 74: 5769-5775), and 2-methyl-1-butanol (See, e.g., WO/2008/098227, WO/2009/076480, and Atsumi et al., 2008, Nature 451: 86-89).

[0116] As used herein, the terms “DHAD” or “DHAD enzyme” or “dihydroxyacid dehydratase” are used interchangeably to refer to an enzyme that catalyzes the conversion of 2,3-dihydroxyisovalerate to ketoisovalerate and/or the conversion of 2,3-dihydroxy-3-methylvalerate to 2-keto-3-methylvalerate. DHAD sequences are available from a vast array of microorganisms, including, but not limited to, L. lactis, E. coli, S. cerevisiae, B. subtilis, Streptococcus pneumoniae, and Streptococcus mutans. A representative list of DHAD enzymes that can benefit from the methods described herein, such as the increased expression of NFS1 and/or ISD11 or homologs thereof, include, but are not limited to those, disclosed in commonly owned and co-pending U.S. Patent Publication No. 2011/0076733. Such DHAD enzymes may be cytosolically localized or mitochondrially localized. A representative listing of DHAD enzymes exhibiting cytosolic localization and activity are disclosed in commonly owned and co-pending U.S. Patent Publication No. 2011/0076733.

[0117] A person skilled in the art, equipped with this disclosure, will appreciate suitable methods for increasing the expression (i.e. overexpressing) NFS1 or a homolog thereof and/or ISD11 or a homolog thereof. For instance, in one embodiment, NFS1 or a homolog thereof and/or ISD11 or a homolog thereof may be overexpressed from a plasmid. In another embodiment, one or more copies of the NFS1 gene or a homolog thereof and/or one or more copies of the ISD11 gene or a homolog thereof is inserted into the chromosome under the control of a constitutive promoter. In addition, a skilled person in the art, equipped with this disclosure, will recognize that the amount of NFS1 and/or ISD11 overexpressed may vary from one yeast to the next. For example, the optimal level of overexpression may be one, two, three, four or more copies in a given yeast. As would be understood in the art, naturally occurring homologs of NFS1 and ISD11 in yeast other than S. cerevisiae can similarly be overexpressed using the methods of the present invention. NFS1 and ISD11 homologs and methods of identifying such NFS1 and ISD11 homologs are described herein.

[0118] A person skilled in the art will be able to utilize publicly available sequences to construct relevant recombinant microorganisms with altered expression of NFS1 and/or ISD11 homologs. A listing of a representative number of NFS1 and ISD11 homologs known in the art and useful in the construction of recombinant microorganisms engineered for increased DHAD activity are listed in the attached Sequence Listing. One skilled in the art, equipped with this disclosure, will appreciate other suitable homologs for the generation of recombinant microorganisms with increased DHAD activity. Sequences of NFS1 and ISD11 genes found in sub-species or variants of a given species may not be identical. While it is preferred to overexpress a NFS1 and/or ISD11 gene(s) native to the subspecies or variant, NFS1 and/or ISD11 gene(s) may be interchangeably expressed across subspecies or variants of the same species or of different species.

[0119] In various exemplary embodiments, increasing the expression of NFS1 or a homolog thereof alone, ISD11 or a homolog thereof alone, or NFS1 or homologs thereof in combination with ISD11 or homologs thereof will increase DHAD activity and the production of beneficial metabolites from DHAD-requiring biosynthetic pathways. As described herein, the increased activity of DHAD in a recombinant microorganism is a favorable characteristic for the production of beneficial metabolites including isobutanol, 3-methyl-1-butanol, 2-methyl-1-butanol, valine, isoleucine, leucine, and pantothenic acid derived from DHAD-requiring biosynthetic pathways. Without being bound by any theory, it is believed that the increase in DHAD activity as observed by the present inventors results from the enhanced formation of FeS clusters as mediated by the altered regulation, expression, and/or activity of NFS1 and/or ISD11. Thus, in various embodiments described herein, the present invention provides recombinant microorganisms with increased DHAD activity as a result of alterations in NFS1 and/or ISD11 regulation, expression, and/or activity. In one embodiment, the alteration in NFS1 and/or ISD11 regulation, expression, and/or activity increases the activity of a cytosolically-localized DHAD. In another embodiment, the alteration in NFS1 and/or ISD11 regulation, expression, and/or activity increases the activity of a mitochondrially-localized DHAD.

[0120] While particularly useful for the biosynthesis of isobutanol, the altered regulation, expression, and/or activity of NFS1 and/or ISD11 is also beneficial to any other fermentation process in which increased DHAD activity is desirable, including, but not limited to, the biosynthesis of isoleucine, valine, leucine, pantothenic acid (vitamin B5), 2-methyl-1-butanol, and 3-methyl-1-butanol.

[0121] As described herein, the present inventors have observed increased isobutanol titers, productivity, and yields in recombinant microorganisms exhibiting increased expression of NFS1 and/or ISD11. Without being bound by any theory, it is believed that the increases in isobutanol titer, productivity, and yield are due to the observed increases in DHAD activity. Thus, in one embodiment, the present invention provides a recombinant microorganism for producing isobutanol, wherein said recombinant microorganism comprises an isobutanol producing metabolic pathway, and wherein the expression of NFS1 or a homolog thereof is increased. In another embodiment, the present invention provides a recombinant microorganism for producing isobutanol, wherein said recombinant microorganism comprises an isobutanol producing metabolic pathway, and wherein the expression of ISD11 or a homolog thereof is increased. In yet another embodiment, the present invention provides a recombinant microorganism for producing isobutanol, wherein said recombinant microorganism comprises an isobutanol producing metabolic pathway, and wherein the expression of NFS1 or a homolog thereof and ISD11 or a homolog thereof is increased. As would be understood in the art, naturally occurring homologs of NFS1 and ISD11 in yeast other than S. cerevisiae can similarly be overexpressed using the methods of the present invention. NFS1 and ISD11 homologs and methods of identifying such NFS1 and ISD11 homologs are described herein. Thus, in some embodiments, nucleic acids having an identity to NFS1 and/or ISD11 of at least about 50%, of at least about 60%, of at least about 70%, at least about 80%, or at least about 90% can be used for a similar purpose.

[0122] In one embodiment, the present invention provides a recombinant microorganism for producing isobutanol, wherein said recombinant microorganism comprises an isobutanol producing metabolic pathway, and wherein the activity of Nfs1 or a homolog thereof is increased. In another embodiment, the present invention provides a recombinant microorganism for producing isobutanol, wherein said recombinant microorganism comprises an isobutanol producing metabolic pathway, and wherein the activity of Isd11 or a homolog thereof is increased. In yet another embodiment, the present invention provides a recombinant microorganism for producing isobutanol, wherein said recombinant microorganism comprises an isobutanol producing metabolic pathway, and wherein the activity of Nfs1 or a homolog thereof and Isd11 or a homolog thereof is increased.

[0123] In alternative embodiments, proteins having an identity to Nfs1 and/or Isd11 of at least about 50%, of at least about 60%, of at least about 70%, at least about 80%, or at least about 90% can be used for a similar purpose.

[0124] In various embodiments described herein, the recombinant microorganism comprises an isobutanol producing metabolic pathway. In one embodiment, the isobutanol producing metabolic pathway comprises at least one exogenous gene encoding a polypeptide that catalyzes a step in the conversion of pyruvate to isobutanol. In another embodiment, the isobutanol producing metabolic pathway comprises at least two exogenous genes encoding polypeptides that catalyze steps in the conversion of pyruvate to isobutanol. In yet another embodiment, the isobutanol producing metabolic pathway comprises at least three exogenous genes encoding polypeptides that catalyze steps in the conversion of pyruvate to isobutanol. In yet another embodiment, the isobutanol producing metabolic pathway comprises at least four exogenous genes encoding polypeptides that catalyze steps in the conversion of pyruvate to isobutanol. In yet another embodiment, the isobutanol producing metabolic pathway comprises at least five exogenous genes encoding polypeptides that catalyze steps in the conversion of pyruvate to isobutanol. In yet another embodiment, all of the isobutanol producing metabolic pathway steps in the conversion of pyruvate to isobutanol are converted by exogenously encoded enzymes.

[0125] In one embodiment, one or more of the isobutanol pathway genes encodes an enzyme that is localized to the cytosol. In one embodiment, the recombinant microorganisms comprise an isobutanol producing metabolic pathway with at least one isobutanol pathway enzyme localized in the cytosol. In another embodiment, the recombinant microorganisms comprise an isobutanol producing metabolic pathway with at least two isobutanol pathway enzymes localized in the cytosol. In yet another embodiment, the recombinant microorganisms comprise an isobutanol producing metabolic pathway with at least three isobutanol pathway enzymes localized in the cytosol. In yet another embodiment, the recombinant microorganisms comprise an isobutanol producing metabolic pathway with at least four isobutanol pathway enzymes localized in the cytosol. In an exemplary embodiment, the recombinant microorganisms comprise an isobutanol producing metabolic pathway with five isobutanol pathway enzymes localized in the cytosol. In yet another exemplary embodiment, the recombinant microorganisms comprise an isobutanol producing metabolic pathway with all isobutanol pathway enzymes localized in the cytosol. In a further exemplary embodiment, at least one of the pathway enzymes localized to the cytosol is a cytosolically active DHAD enzyme as disclosed herein.

[0126] In various embodiments described herein, the isobutanol pathway genes may encode enzyme(s) selected from the group consisting of acetolactate synthase (ALS), ketol-acid reductoisomerase (KARI), dihydroxyacid dehydratase (DHAD), 2-keto-acid decarboxylase, e.g., keto-isovalerate decarboxylase (KIVD), and alcohol dehydrogenase (ADH).

### Enhancing DHAD Activity by Increasing Cysteine Availability in the Yeast Cell

[0127] Because Nfs1 and Isd11 catalyze an early step of FeS cluster biogenesis in the yeast mitochondria by mobilizing sulfur into the FeS biogenesis pathway from cysteine, overexpression of NFS1 and ISD11 as described herein can be combined with methods for increasing cysteine availability in the cell to augment the increase in FeS protein activity in the yeast cells. Specifically, increasing the expression of the genes MET3, MET14, MET16, MET10, MET5, MET1, MET8, MET2, MET17, HOM3, HOM2, HOM6, CYS3, CYS4, SUL1 and SUL2, alone or in combinations, to increase cysteine biosynthesis by the cell and/or increasing the expression of the transport protein-encoding genes YCT1, MUP1, GAP1, AGP1, GNP1, BAP1, BAP2, BAP3, TAT1 and TAT2, alone or in combinations, to increase uptake of exogenous cysteine by the cell will increase the amount and availability of cysteine for use by Nfs1 and Isd11 in yeast overexpressing NFS1 and ISD11. Accordingly, recombinant microorganisms engineered to overexpress MET3, MET14, MET16, MET10, MET5, MET1, MET8, MET2, MET17, HOM3, HOM2, HOM6, CYS3, CYS4, SUL1 SUL2, YCT1, MUP1, GAP1, AGP1, GNP1, BAP1, BAP2, BAP3, TAT1 and TAT2, alone or in combinations, are within the scope of the present invention. Such modifications can be used to further increase DHAD activity and enhance the titers, productivity, and yields in strains comprising DHAD as part of an DHAD-requiring biosynthetic pathway, e.g., an isobutanol producing metabolic pathway.

[0128] Additionally, the overexpression of heterologous serine o-acetyltransferases, including, but not limited to, the Beta vulgaris serine o-acetyltransferase (“Bv_SAT”) (Mulet et al., 2004, Yeast 21: 303-312), is another way to increase the level and availability of cysteine within yeast cells for the production of FeS cluster-containing proteins in yeast overexpressing NFS1 and ISD11. Accordingly, recombinant microorganisms engineered to overexpress a heterologous serine o-acetyltransferase are also within the scope of the present invention. In one embodiment, the heterologous serine o-acetyltransferase is encoded by Bv_SAT. As described herein, the expression of a heterologous serine o-acetyltransferase can be used to further increase DHAD activity and enhance the titers, productivity, and yields in strains comprising DHAD as part of an DHAD-requiring biosynthetic pathway, e.g., an isobutanol producing metabolic pathway.

[0129] Furthermore, the addition of increased exogenous cysteine to yeast cells, separately from or in addition to increased expression of the transport protein-encoding genes listed above, may also be used to increase the level and availability of cysteine within yeast cells for the production of FeS cluster-containing proteins in yeast overexpressing NFS1 and ISD11, and is therefore also within the scope of the present invention.

Enhancing DHAD Activity by Altering Aft1/Aft2 Activity and/or Expression

[0130] The present inventors have also found that altering the expression of the AFT1 and/or AFT2 genes of S. cerevisiae surprisingly increases DHAD activity and contributes to increased isobutanol titers, productivity, and yield in strains comprising DHAD as part of an isobutanol-producing metabolic pathway. The observed increases in DHAD activity resulting from the increased expression of AFT1 and/or AFT2 therefore has broad applicability to any DHAD-requiring biosynthetic pathway, as DHAD activity is often a rate-limiting component of such pathways.

[0131] Accordingly, one aspect of the invention is directed to a recombinant microorganism comprising a DHAD-requiring biosynthetic pathway, wherein said microorganism is engineered to overexpress one or more polynucleotides encoding one or more Aft proteins or homologs thereof.

[0132] Without being bound by any theory, it is believed that altered expression of an AFT gene (e.g. the AFT1 and/or AFT2 genes) enhances cellular iron availability, which leads to an improvement in the activity of the iron-sulfur (FeS) cluster-containing protein, DHAD. The observation that increased expression of the AFT genes improves DHAD activity is surprising, particularly in light of recently published findings by Ihrig et al. (2010, Eukaryotic Cell 9: 460-471). Notably, Ihrig et al. observed that the increased expression of Aft1 in S. cerevisiae had little to no effect on the activity of another FeS cluster-containing protein, Leu1 (isopropylmalate isomerase of the leucine biosynthesis pathway). In contrast to observations made by Ihrig et al. with respect to the FeS protein, Leu1, the present inventors unexpectedly observed that increased expression of Aft1 and/or Aft2 resulted in a significant increase in the activity of DHAD, also an iron-sulfur (FeS) cluster-containing protein. Moreover, in strains comprising DHAD as part of an isobutanol-producing metabolic pathway, the increased expression of Aft1 produced significant increases in isobutanol titer, productivity, and yield.

[0133] In S. cerevisiae, AFT1 and AFT2 encode for the transcription factors, Aft1 and Aft2 (“activator of ferrous transport”), respectively. It is hypothesized that Aft1 and Aft2 activate gene expression when iron is scarce in wild-type S. cerevisiae. Consequently, strains lacking both Aft1 and Aft2 exhibit reduced expression of the iron regulon. As with many other paralogous genes, AFT1 and AFT2 code for proteins that have significant regions of identity and overlapping functions. The DNA-binding domain of each protein is in a highly conserved N-terminal region, and a conserved cysteine-to-phenylalanine mutation in either protein generates a factor that activates the high expression of the iron regulon irrespective of iron concentrations.

[0134] In yeast, homeostatic regulation of iron uptake occurs (Eide et al., 1992, J. Biol. Chem. 267: 20774-81). Iron deprivation induces activity of a high affinity iron uptake system. This induction is mediated by increased transcript levels for genes involved in the iron uptake system, and AFT1 is hypothesized to play a critical role in this process (Yamaguchi-Iwai et al., 1995, The EMBO Journal 14: 1231-9). Yamaguchi-Iwai et al. observed that mutant strains lacking AFT1, due to gene deletion, are unable to induce the high-affinity iron uptake system. On the other hand, mutant strains carrying the AFT1^{UP} allele exhibit a gain-of-function phenotype in which iron uptake cannot be repressed by available iron in the environment. The AFT1^{UP} and AFT2^{UP} alleles described above act as gain of function point mutations. AFT1^{UP} is due to the mutation Cys²⁹¹Phe (Rutherford et al., 2005, Journal of Biological Chemistry 281: 10135-40). AFT2^{UP} is due to the mutation Cys¹⁸⁷Phe (Rutherford et al., 2001, PNAS 98: 14322-27).

[0135] There are clear phenotypic differences in strains that separately lack AFT1 or AFT2. An aft1 null strain exhibits low ferrous iron uptake and grows poorly under low-iron conditions or on a respiratory carbon source. No phenotype has been attributed to an aft2 null strain. An aft1 aft2 double null strain is, however, more sensitive to low-iron growth than a single aft1 null strain, which is consistent with the functional similarity of these factors. The partial redundancy of these factors allows AFT2 to complement an aft1 null strain when it is overexpressed from a plasmid. The properties of Aft1 and Aft2 that distinguish them from each other have not been fully elucidated. Both factors mediate gene regulation via an iron-responsive element that contains the core sequence 5′-CACCC-3′. Without being bound to any theory, it is likely that sequences adjacent to this element influence the ability of each factor to mediate regulation via a particular iron-responsive element. The differential regulation of individual genes by Aft1 and Aft2 results in each factor generating a distinct global transcriptional profile (Table 1) (Rutherford et al., 2004, Eukaryotic Cell 3: 1-13; Conde e Silva et al., 2009, Genetics 183: 93-106).

TABLE 1
Genes Regulated by Metal-Responsive Transcription Factors.

| Transcription | | |
|---|---|---|
| Factor | Description | Gene Name(s) |
| Aft1 | Transporters | FET4, FET5, FTR1, FTH1, SMF3, |
| | | MRS3, MRS4, CCC2, COT1 |
| | Cu chaperone | ATX1 |
| | Ferroxidase | FET3, FET5 |
| | Metalloreductases | FRE1, FRE2, FRE3, FRE4, FRE5, |
| | | FRE6 |
| | Cell wall proteins | FIT1, FIT2, FIT3 |
| | Siderophore transport | ARN1, ARN2, ARN3, ARN4 |
| | Fe—S biosynthesis | ISU1, ISU2 |
| | Other | TIS11, HMX1, AKR1, PCL5, |
| | | YOR387c, YHL035c, YMR034c, |
| | | ICY2, PRY1, YDL124w, CTH1, |
| | | CTH2, |
| Aft2 | Transporters | SMF3, MRS4, FTR1, COT1 |
| | Cu chaperone | ATX1 |
| | Ferroxidase | FET3, FET5 |
| | Metalloreductases | FRE1 |
| | Cell wall proteins | FIT1, FIT3, FIT2 |
| | Fe—S biosynthesis | ISU1 |
| | Other | BNA2, ECM4, LAP4, TIS11, |
| | | YOL083w, YGR146c, YHL035c |

[0136] In S. cerevisiae, the Aft1 regulon consists of many genes that are involved in the acquisition, compartmentalization, and utilization of iron. These include genes involved in iron uptake (FET3, FTR1, and FRE1, FRE2), siderophore uptake (ARN1-4 and FIT1-3), iron transport across the vacuole membrane (FTH1), and iron-sulfur cluster formation (ISU1 and ISU2). Aft1 binds to a conserved promoter sequence in an iron-dependent manner and activates transcription under low-iron conditions. The Aft2 regulator controls the expression of several distinct genes (Table 2) (Rutherford et al., 2004, Eukaryotic Cell 3: 1-13). The initial step in iron acquisition requires reduction of ferric iron chelates in the environment by externally directed reductases encoded by the FRE1 and FRE2 genes, thereby generating the ferrous iron substrate for the transport process (Dancis et al., 1992, PNAS 89: 3869-73; Georgatsou and Alexandraki, 1994, Mol. Cell. Biol. 14: 3065-73). FET3 encodes a multi-copper oxidase (Askwith et al., 1994, Cell 76: 403-10; De Silva et al., 1995, J. Biol. Chem. 270: 1098-1101) that forms a molecular complex with the iron permease encoded by FTR1. This complex, located in the yeast plasma membrane, mediates the high-affinity transport of iron into the cell (Stearman et al., 1996, Science 271: 1552-7). AFT genes may be found in yeast strains other than S. cerevisiae. For example, in K. lactis, a homolog of the S. cerevisiae AFT1 has been found and designated Kl_AFT (Conde e Silva et al., 2009, Genetics 183: 93-106). In this fungus, Kl_Aft has been found to activate transcription of genes regulated by Aft1 in S. cerevisiae. Thus, altering the regulation, activity, and/or expression of AFT homologs in fungal strains other than S. cerevisiae, is also within the scope of this invention. A person skilled in the art will be able to utilize publicly available sequences to construct relevant recombinant microorganisms with altered expression of AFT homologs. A listing of a representative number of AFT homologs known in the art and useful in the construction of recombinant microorganisms engineered for increased DHAD activity are listed Table 2. One skilled in the art, equipped with this disclosure, will appreciate other suitable homologs for the generation of recombinant microorganisms with increased DHAD activity. Sequences of AFT genes found in sub-species or variants of a given species may not be identical (See, e.g., >98% identity amongst S. cerevisiae AFT1 genes of SEQ ID NOs: 1, 208, 210, 212, 214, 216, 218, 220, 222, and 224). While it is preferred to overexpress an AFT gene native to the subspecies or variant, AFT genes may be interchangeably expressed across subspecies or variants of the same species.

TABLE 2
Representative Aft Homologs of Yeast Origin

| | Nucleic Acid | Amino Acid |
|---|---|---|
| | Sequence | Sequence |
| | (SEQ | (SEQ |
| Species Origin (Gene Name) | ID NO) | ID NO) |
| Saccharomyces cerevisiae S288c (AFT1) | 1 | 2 |
| Saccharomyces cerevisiae S288c (AFT2) | 3 | 4 |
| Candida glabrata (AFT1) | 5 | 6 |
| Candida glabrata (AFT2) | 7 | 8 |
| Zygosaccharomyces rouxii (AFT) | 9 | 10 |
| Ashbya gossypii (AFT) | 11 | 12 |
| Kluyveromyces lactis (AFT) | 13 | 14 |
| Vanderwaltozyma polyspora (AFT) | 15 | 16 |
| Lachancea thermotolerans (AFT) | 17 | 18 |
| Debaromyces hanseii (AFT) | 19 | 20 |
| Saccharomyces bayanus* | 21 | 22 |
| Saccharomyces castelli* | 23 | 24 |
| Kluyveromyces waltii* | 25 | 26 |
| Saccharomyces kluyveri* | 27 | 28 |
| Kluyveromyces marxianus | 29 | 30 |
| Issatchenkia orientalis (AFT1-1) | 31 | 32 |
| Issatchenkia orientalis (AFT1-2) | 33 | 34 |
| Saccharomyces bayanus (AFT2) | 35 | 36 |
| Saccharomyces castelli (AFT2) | 37 | 38 |
| S. cerevisiae W303 (AFT1) | 208 | 209 |
| S. cerevisiae DBVPG1106 (AFT1) | 210 | 211 |
| S. cerevisiae NCYC361 (AFT1) | 212 | 213 |
| S. cerevisiae Y55 (AFT1) | 214 | 215 |
| S. cerevisiae YJM981 (AFT1) | 216 | 217 |
| S. cerevisiae RM11_1A (AFT1) | 218 | 219 |
| S. cerevisiae UWOPS87_2421 (AFT1) | 220 | 221 |
| S. cerevisiae SK1 (AFT1) | 222 | 223 |
| S. cerevisiae YPS606 (AFT1) | 224 | 225 |

*Byrne K. P., Wolfe, K. H. (2005) The Yeast Gene Order Browser: combining curated homology and syntenic context reveals gene fate in polyploid species. Genome Research, 15(10): 1456-61

[0137] Without being bound by any theory, it is believed that increasing the expression of the gene AFT1 or a homolog thereof will modulate the amount and availability of iron in the host cell. Since Aft1 activates the expression of target genes in response to changes in iron availability, overexpression of AFT1 increases the machinery to import more iron into the cytosol and/or mitochondria. A person skilled in the art, equipped with this disclosure, will appreciate suitable methods for increasing the expression (i.e. overexpressing) AFT1. For instance, in one embodiment, AFT1 or homolog thereof may be overexpressed from a plasmid. In another embodiment, one or more copies of the AFT1 gene or a homolog thereof is inserted into the chromosome under the control of a constitutive promoter. In addition, a skilled person in the art, equipped with this disclosure, will recognize that the amount of AFT1 overexpressed may vary from one yeast to the next. For example, the optimal level of overexpression may be one, two, three, four or more copies in a given yeast.

[0138] In additional embodiments, the native Aft1 or homolog thereof may be replaced with a mutant version that is constitutively active. In one embodiment, the native Aft1 is replaced with a mutant version that comprises a modification or mutation at a position corresponding to amino acid cysteine 291 of the S. cerevisiae Aft1 (SEQ ID NO: 2). In an exemplary embodiment, the cysteine 291 residue of the native S. cerevisiae Aft1 (SEQ ID NO: 2) or homolog thereof is replaced with a phenylalanine residue.

[0139] As will be understood by one of ordinary skill in the art, modified Aft1 proteins and homologs thereof may be obtained by recombinant or genetic engineering techniques that are routine and well-known in the art. For example, mutant Aft1 proteins and homologs thereof, can be obtained by mutating the gene or genes encoding Aft1 or the homologs of interest by site-directed mutagenesis. Such mutations may include point mutations, deletion mutations and insertional mutations. For example, one or more point mutations (e.g., substitution of one or more amino acids with one or more different amino acids) may be used to construct mutant Aft1 proteins of the invention. The corresponding cysteine position of Aft1 homologs may be readily identified by one skilled in the art. Thus, given the defined region and the examples described in the present application, one with skill in the art can make one or a number of modifications which would result in the constitutive expression of Aft1.

[0140] Without being bound by any theory, it is believed that increasing the expression of the gene AFT2 or a homolog thereof will modulate the amount and availability of iron in the host cell. AFT2 overexpression is predicted to result in increased expression of the machinery to import more iron into the cytosol and/or mitochondria. A person skilled in the art, equipped with this disclosure, will appreciate suitable methods for increasing the expression (i.e. overexpression) of AFT2. For instance, in one embodiment, AFT2 or homolog thereof may be overexpressed from a plasmid. In another embodiment, one or more copies of the AFT2 gene or a homolog thereof is inserted into the chromosome under the control of a constitutive promoter. In addition, a skilled person in the art, equipped with this disclosure, will recognize that the amount of AFT2 overexpressed may vary from one yeast to the next. For example, the optimal level of overexpression may be one, two, three, four or more copies in a given yeast. Moreover, the expression level may be tuned by using a promoter that achieves the optimal expression level in a given yeast

[0141] In another embodiment, the native Aft2 or homolog thereof may be replaced with a mutant version that is constitutively active. In one embodiment, the native Aft2 is replaced with a mutant version that comprises a modification or mutation at a position corresponding to amino acid cysteine 187 of the S. cerevisiae Aft2 (SEQ ID NO: 4). In an exemplary embodiment, the cysteine 187 residue of the native S. cerevisiae Aft2 (SEQ ID NO: 4) or homolog thereof is replaced with a phenylalanine residue.

[0142] As will be understood by one of ordinary skill in the art, modified Aft2 proteins and homologs thereof may be obtained by recombinant or genetic engineering techniques that are routine and well-known in the art. For example, mutant Aft2 proteins and homologs thereof, can be obtained by mutating the gene or genes encoding Aft2 or the homologs of interest by site-directed. Such mutations may include point mutations, deletion mutations and insertional mutations. For example, one or more point mutations (e.g., substitution of one or more amino acids with one or more different amino acids) may be used to construct mutant Aft2 proteins of the invention. The corresponding cysteine position of Aft2 homologs may be readily identified by one skilled in the art. Thus, given the defined region and the examples described in the present application, one with skill in the art can make one or a number of modifications which would result in the constitutive expression of Aft2.

[0143] In various exemplary embodiments, increasing the expression of both AFT1 and/or AFT2 will increase DHAD activity and the production of beneficial metabolites from DHAD-requiring biosynthetic pathways.

[0144] Embodiments in which the regulation, activity, and/or expression of AFT1 and/or AFT2 are altered can also be combined with increases in the extracellular iron concentration to provide increased iron in the cytosol and/or mitochondria of the cell. Increase in iron in either the cytosol or the mitochondria by this method appears to make iron more available for the FeS cluster-containing protein, DHAD. Without being bound by any theory, it is believed that such an increase in iron leads to a corresponding increase in DHAD activity.

[0145] As described herein, the increased activity of DHAD in a recombinant microorganism is a favorable characteristic for the production of beneficial metabolites including isobutanol, 3-methyl-1-butanol, 2-methyl-1-butanol, valine, isoleucine, leucine, and pantothenic acid derived from DHAD-requiring biosynthetic pathways. Without being bound by any theory, it is believed that the increase in DHAD activity as observed by the present inventors results from enhanced cellular iron levels as mediated by the altered regulation, expression, and/or activity of AFT1 and/or AFT2. Thus, in various embodiments described herein, the present invention provides recombinant microorganisms with increased DHAD activity as a result of alterations in AFT1 and/or AFT2 regulation, expression, and/or activity. In one embodiment, the alteration in AFT1 and/or AFT2 regulation, expression, and/or activity increases the activity of a cytosolically-localized DHAD. In another embodiment, the alteration in AFT1 and/or AFT2 regulation, expression, and/or activity increases the activity of a mitochondrially-localized DHAD.

[0146] While particularly useful for the biosynthesis of isobutanol, the altered regulation, expression, and/or activity of AFT1 and/or AFT2 is also beneficial to any other fermentation process in which increased DHAD activity is desirable, including, but not limited to, the biosynthesis of isoleucine, valine, leucine, pantothenic acid (vitamin B5), 2-methyl-1-butanol, and 3-methyl-1-butanol.

[0147] As described herein, the present inventors have observed increased isobutanol titers, productivity, and yields in recombinant microorganisms exhibiting increased expression of AFT1 and/or AFT2. Without being bound by any theory, it is believed that the increases in isobutanol titer, productivity, and yield are due to the observed increases in DHAD activity. Thus, in one embodiment, the present invention provides a recombinant microorganism for producing isobutanol, wherein said recombinant microorganism comprises an isobutanol producing metabolic pathway, and wherein the expression of AFT1 or a homolog thereof is increased. In another embodiment, the present invention provides a recombinant microorganism for producing isobutanol, wherein said recombinant microorganism comprises an isobutanol producing metabolic pathway, and wherein the expression of AFT2 or a homolog thereof is increased. In yet another embodiment, the present invention provides a recombinant microorganism for producing isobutanol, wherein said recombinant microorganism comprises an isobutanol producing metabolic pathway, and wherein the expression of AFT1 and AFT2 or homologs thereof is increased.

[0148] In alternative embodiments, nucleic acids having a homology to AFT1 and/or AFT2 of at least about 50%, of at least about 60%, of at least about 70%, at least about 80%, or at least about 90% similarity can be used for a similar purpose.

[0149] In one embodiment, the present invention provides a recombinant microorganism for producing isobutanol, wherein said recombinant microorganism comprises an isobutanol producing metabolic pathway, and wherein the activity of Aft1 or a homolog thereof is increased. In another embodiment, the present invention provides a recombinant microorganism for producing isobutanol, wherein said recombinant microorganism comprises an isobutanol producing metabolic pathway, and wherein the activity of Aft2 or a homolog thereof is increased. In yet another embodiment, the present invention provides a recombinant microorganism for producing isobutanol, wherein said recombinant microorganism comprises an isobutanol producing metabolic pathway, and wherein the activity of Aft1 and Aft2 or homologs thereof is increased.

[0150] In alternative embodiments, proteins having a homology to Aft1 and/or Aft2 of at least about 50%, of at least about 60%, of at least about 70%, at least about 80%, or at least about 90% similarity can be used for a similar purpose.

[0151] In one embodiment, the isobutanol producing metabolic pathway comprises at least one exogenous gene that catalyzes a step in the conversion of pyruvate to isobutanol. In another embodiment, the isobutanol producing metabolic pathway comprises at least two exogenous genes that catalyze steps in the conversion of pyruvate to isobutanol. In yet another embodiment, the isobutanol producing metabolic pathway comprises at least three exogenous genes that catalyze steps in the conversion of pyruvate to isobutanol. In yet another embodiment, the isobutanol producing metabolic pathway comprises at least four exogenous genes that catalyze steps in the conversion of pyruvate to isobutanol. In yet another embodiment, the isobutanol producing metabolic pathway comprises at five exogenous genes that catalyze steps in the conversion of pyruvate to isobutanol.

[0152] In one embodiment, one or more of the isobutanol pathway genes encodes an enzyme that is localized to the cytosol. In one embodiment, the recombinant microorganisms comprise an isobutanol producing metabolic pathway with at least one isobutanol pathway enzyme localized in the cytosol. In another embodiment, the recombinant microorganisms comprise an isobutanol producing metabolic pathway with at least two isobutanol pathway enzymes localized in the cytosol. In yet another embodiment, the recombinant microorganisms comprise an isobutanol producing metabolic pathway with at least three isobutanol pathway enzymes localized in the cytosol. In yet another embodiment, the recombinant microorganisms comprise an isobutanol producing metabolic pathway with at least four isobutanol pathway enzymes localized in the cytosol. In an exemplary embodiment, the recombinant microorganisms comprise an isobutanol producing metabolic pathway with five isobutanol pathway enzymes localized in the cytosol. In a further exemplary embodiment, at least one of the pathway enzymes localized to the cytosol is a cytosolically active DHAD enzyme as disclosed herein.

[0153] In various embodiments described herein, the isobutanol pathway genes may encode enzyme(s) selected from the group consisting of acetolactate synthase (ALS), ketol-acid reductoisomerase (KARI), dihydroxyacid dehydratase (DHAD), 2-keto-acid decarboxylase, e.g., keto-isovalerate decarboxylase (KIVD), and alcohol dehydrogenase (ADH).

[0154] As described above, the transcription factors Aft1 and Aft2 regulate genes involved in the acquisition, compartmentalization, and utilization of iron. Thus, in additional aspects, the present invention provides methods of increasing DHAD activity and the production of beneficial metabolites produced from DHAD-requiring biosynthetic pathways as a result of alterations in the regulation, expression, and/or activity of genes regulated by Aft1 and Aft2. In one embodiment, the gene(s) regulated by Aft1 and Aft2 is selected from the group consisting of FET3, FET4, FET5, FTR1, FTH1, SMF3, MRS4, CCC2, COT1, ATX1, FRE1, FRE2, FRE3, FRE4, FRE5, FREE, FIT1, FIT2, FIT3, ARN1, ARN2, ARN3, ARN4, ISU1, ISU2, TIS11, HMX1, AKR1, PCL5, YOR387C, YHL035C, YMR034C, ICY2, PRY1, YDL124W, BNA2, ECM4, LAP4, YOL083W, YGR146C, B105, YDR271C, OYE3, CTH1, CTH2, MRS3, MRS4, HSP26, YAP2, VMR1, ECL1, OSW1, NFT1, ARA2, TAF1/TAF130/TAF145, YOR225W, YKR104W, YBR012C, and YMR041C or a homolog thereof. While particularly useful for the biosynthesis of isobutanol, the altered regulation, expression, and/or activity of genes regulated by Aft1 and Aft2 is also beneficial to any other fermentation process in which increased DHAD activity is desirable, including, but not limited to, the biosynthesis of isoleucine, valine, leucine, pantothenic acid (vitamin B5), 1-butanol, 2-methyl-1-butanol, and 3-methyl-1-butanol.

[0155] In one embodiment, all genes demonstrated to increase DHAD activity and/or the production of a metabolite from a DHAD-requiring biosynthetic pathway are overexpressed. Where none of the AFT regulon genes expressed alone are effective in increasing DHAD activity and/or the production of a metabolite from a DHAD-requiring biosynthetic pathway, then 1, 2, 3, 4, 5, or more of the genes in the AFT regulon are overexpressed together.

[0156] As described herein, the present inventors have observed increased isobutanol titers, productivity, and yields in recombinant microorganisms exhibiting increased expression of the transcription factors AFT1 and/or AFT2, which regulate the expression of genes involved in the acquisition, compartmentalization, and utilization of iron. Thus, in one embodiment, the present invention provides a recombinant microorganism for producing isobutanol, wherein said recombinant microorganism comprises an isobutanol producing metabolic pathway, and wherein the expression and/or activity of one or more genes selected from the group consisting of FET3, FET4, FET5, FTR1, FTH1, SMF3, MRS4, CCC2, COT1, ATX1, FRE1, FRE2, FRE3, FRE4, FRE5, FREE, FIT1, FIT2, FIT3, ARN1, ARN2, ARN3, ARN4, ISU1, ISU2, TIS11, HMX1, AKR1, PCL5, YOR387C, YHL035C, YMR034C, ICY2, PRY1, YDL124W, BNA2, ECM4, LAP4, YOL083W, YGR146C, B105, YDR271C, OYE3, CTH1, CTH2, MRS3, MRS4, HSP26, YAP2, VMR1, ECL1, OSW1, NFT1, ARA2, TAF1/TAF130/TAF145, YOR225W, YKR104W, YBR012C, and YMR041C or a homolog thereof is increased.

Enhancing DHAD Activity by Increased GRX3/GRX4 Activity and/or Expression

[0157] As described herein, increasing the expression of the genes GRX3 and/or GRX4 will generally modulate the amount and availability of iron in the yeast cytosol or mitochondria. Accordingly, one aspect of the invention is directed to a recombinant microorganism comprising a DHAD-requiring biosynthetic pathway, wherein said microorganism has been engineered to overexpress a polynucleotide encoding Grx3 and/or Grx4 or a homolog thereof. In one embodiment, the polynucleotide encoding the Grx protein or homolog thereof is native to the recombinant microorganism. In another embodiment, the polynucleotide encoding the Grx protein or homolog thereof is heterologous to the recombinant microorganism.

[0158] Grx3 and Grx4 are monothiol glutaredoxins that have been shown to be involved in cellular Fe content modulation and delivery in yeast. Glutaredoxins are glutathione-dependent thiol-disulfide oxidoreductases that function in maintaining the cellular redox homeostasis. S. cerevisiae has two dithiol glutaredoxins (Grx1 and Grx2) and three monothiol glutaredoxins (Grx3, Grx4, and Grx5). The monothiol glutaredoxins are believed to reduce mixed disulfides formed between a protein and glutathione in a process known as deglutathionylation. In contrast, dithiol glutaredoxins can participate in deglutathionylation as well as in the direct reduction of disulfides. Grx5, the most studied monothiol glutaredoxin, is localized to the mitochondrial matrix, where it participates in the maturation of Fe—S clusters. Grx3 and Grx4 are predominantly localized to the nucleus. These proteins can substitute for Grx5 when overexpressed and targeted to the mitochondrial matrix; no information on their natural function has been reported. In addition to the reported interaction between Grx3 and Aft1, iron inhibition of Aft1 requires glutathione. It has been shown that iron sensing is dependent on the presence of the redundant Grx3 and Grx4 proteins. One report indicated that removal of both Grx3 and Grx4 resulted in constitutive expression of the genes regulated by Aft1/Aft2. This result suggested that the cells accumulated Fe at levels greater than normal.

[0159] In one embodiment, Grx3 is overexpressed from a plasmid or by inserting multiple copies of the gene into the chromosome under the control of a constitutive promoter. In another embodiment, Grx4 is overexpressed from a plasmid or by inserting multiple copies of the gene into the chromosome under the control of a constitutive promoter. In another embodiment, Grx3 and Grx4 are overexpressed from a plasmid or by inserting multiple copies of the gene into the chromosome under the control of a constitutive promoter. In another embodiment, Grx3, Grx4, or Grx3 and Grx4 are deleted or attenuated. In another embodiment, Grx3 and Aft1 are overexpressed from a plasmid or by inserting multiple copies of the gene into the chromosome under the control of a constitutive promoter. In another embodiment, Grx4 and Aft1 are overexpressed from a plasmid or by inserting multiple copies of the gene into the chromosome under the control of a constitutive promoter. In another embodiment, Grx3 and Aft2 are overexpressed from a plasmid or by inserting multiple copies of the gene into the chromosome under the control of a constitutive promoter. In another embodiment, Grx4 and Aft2 are overexpressed from a plasmid or by inserting multiple copies of the gene into the chromosome under the control of a constitutive promoter. These embodiments can also be combined with increases in the extracellular iron concentration to provide increased iron in the cytosol or mitochondria of the cell. One or both of: Aft1, Aft2 is overexpressed either alone or in combination with: Grx3 or Grx4. Such overexpression can be accomplished by plasmid or by inserting multiple copies of the gene into the chromosome under the control of a constitutive promoter.

[0160] As described herein, the increased activity of DHAD in a recombinant microorganism is a favorable characteristic for the production of beneficial metabolites including isobutanol, 3-methyl-1-butanol, 2-methyl-1-butanol, valine, isoleucine, leucine, and pantothenic acid from DHAD-requiring metabolic pathways. Thus, in various embodiments described herein, the present invention provides recombinant microorganisms with increased DHAD activity as a result of alterations in GRX3 and/or GRX4 regulation, expression, and/or activity. In one embodiment, the alteration in GRX3 and/or GRX4 regulation, expression, and/or activity increases the activity of a cytosolically-localized DHAD. In another embodiment, the alteration in GRX3 and/or GRX4 regulation, expression, and/or activity increases the activity of a mitochondrially-localized DHAD.

[0161] While particularly useful for the biosynthesis of isobutanol, the altered regulation, expression, and/or activity of GRX3 and/or GRX4 is also beneficial to any other fermentation process in which increased DHAD activity is desirable, including, but not limited to, the biosynthesis of isoleucine, valine, leucine, pantothenic acid (vitamin B5), 1-butanol, 2-methyl-1-butanol, and 3-methyl-1-butanol.

[0162] In one embodiment, the present invention provides a recombinant microorganism for producing isobutanol, wherein said recombinant microorganism comprises an isobutanol producing metabolic pathway, and wherein the expression of GRX3 or a homolog thereof is increased. In another embodiment, the present invention provides a recombinant microorganism for producing isobutanol, wherein said recombinant microorganism comprises an isobutanol producing metabolic pathway, and wherein the expression of GRX4 or a homolog thereof is increased. In yet another embodiment, the present invention provides a recombinant microorganism for producing isobutanol, wherein said recombinant microorganism comprises an isobutanol producing metabolic pathway, and wherein the expression of GRX3 and GRX4 or homologs thereof is increased.

[0163] In alternative embodiments, nucleic acids having a homology to GRX3 and/or GRX4 of at least about 50%, of at least about 60%, of at least about 70%, at least about 80%, or at least about 90% similarity can be used for a similar purpose.

[0164] In one embodiment, the present invention provides a recombinant microorganism for producing isobutanol, wherein said recombinant microorganism comprises an isobutanol producing metabolic pathway, and wherein the activity of Grx3 or a homolog thereof is increased. In another embodiment, the present invention provides a recombinant microorganism for producing isobutanol, wherein said recombinant microorganism comprises an isobutanol producing metabolic pathway, and wherein the activity of Grx4 or a homolog thereof is increased. In yet another embodiment, the present invention provides a recombinant microorganism for producing isobutanol, wherein said recombinant microorganism comprises an isobutanol producing metabolic pathway, and wherein the activity of Grx3 and Grx4 or homologs thereof is increased.

[0165] In alternative embodiments, proteins having a homology to Grx3 and/or Grx4 of at least about 50%, of at least about 60%, of at least about 70%, at least about 80%, or at least about 90% similarity can be used for a similar purpose.

Altering the Iron-Sulfur Cluster Domain and/or Redox Active Domain

[0166] In general, the yeast cytosol demonstrates a different redox potential than a bacterial cell, as well as the yeast mitochondria. As a result, isobutanol pathway enzymes such as DHAD which exhibit an iron sulfur (FeS) domain and/or redox active domain, may require the redox potential of the native environments to be folded or expressed in a functional form. Expressing the protein in the yeast cytosol, which can harbor unfavorable redox potential, has the propensity to result in an inactive protein, even if the protein is expressed. The present inventors have identified a number of different strategies to overcome this problem, which can arise when an isobutanol pathway enzyme such as DHAD which is suited to a particular environment with a specific redox potential is expressed in the yeast cytosol.

[0167] In one embodiment, the present invention provides DHAD enzymes that exhibit a properly folded iron-sulfur cluster domain and/or redox active domain in the cytosol. Such DHAD enzymes may either be native or heterologous DHAD homologs or functional analogs or comprise a mutated or modified iron-sulfur cluster domain and/or redox active domain, allowing for a DHAD enzyme to be expressed in the yeast cytosol in a functional form. Thus, if an enzyme in the isobutanol production pathway was identified that was fully soluble and active in the cytosol of said recombinant microorganism, such enzyme can be used without addition of chaperone proteins not already present in the cytosol or without increased expression of chaperone proteins already present in the cytosol. However, some DHAD proteins may need the assistance of additional chaperones or increased chaperone levels to exhibit optimal cytosolic activity.

[0168] Therefore, in various embodiments described herein, the recombinant microorganisms may further comprise a nucleic acid encoding a chaperone protein, wherein said chaperone protein assists the folding of a protein exhibiting cytosolic activity. Addition of the chaperone protein can lead to improved activity, solubility, and/or correct folding of the DHAD enzyme. In one embodiment, the chaperone may be a native protein. In another embodiment, the chaperone protein may be an exogenous protein. In some embodiments, the chaperone protein may be selected from the group consisting of: endoplasmic reticulum oxidoreductin 1 (Ero1, accession no. NP_{—}013576.1), including variants of Ero1 that have been suitably altered to reduce or prevent its normal localization to the endoplasmic reticulum; thioredoxins (which includes Trx1, accession no. NP_{—}013144.1; and Trx2, accession no. NP_{—}011725.1), thioredoxin reductase (Trr1, accession no. NP_{—}010640.1); glutaredoxins (which includes Grx1, accession no. NP_{—}009895.1; Grx2, accession no. NP_{—}010801.1; Grx3, accession no. NP_{—}010383.1; Grx4, accession no. NP_{—}01101.1; Grx5, accession no. NP_{—}015266.1; Grx6, accession no. NP_{—}010274.1; Grx7, accession no. NP_{—}009570.1; Grx8, accession no. NP_{—}013468.1); glutathione reductase Girl (accession no. NP_{—}015234.1); Jac1 (accession no. NP_{—}011497.1), including variants of Jac1 that have been suitably altered to reduce or prevent its normal mitochondrial localization; Hsp60 and Hsp10 proteins (e.g., yeast Hsp 60 and Hsp10 proteins, or other eukaryotic Hsp60 and Hsp10 homologs), bacterial chaperonin homologs (e.g., GroEL and GroES proteins from Lactococcus lactis); homologs or active variants thereof, and combinations thereof.

[0169] As described herein, it is preferred that the DHAD enzymes are properly assembled and folded, thus allowing for said DHADs to exhibit maximal activity in the cytosol. In yeast, the DHAD Ilv3 is involved in biosynthesis of the amino acids leucine, isoleucine and valine. Ilv3 is typically localized to the mitochondria, where the chaperonin proteins Hsp60 and Hsp10 aid in the proper folding of the protein (Dubaquie et. al. The EMBO Journal 1998 17: 5868-5876). In wild-type yeast cells, Ilv3 is found in the soluble fraction of cell lysates. In extracts from an hsp60 temperature-sensitive mutant, at the non-permissive temperature, there is no detectable soluble Ilv3. All of the protein is found in the insoluble fraction, in a presumably inactivated state. In an hsp10 temperature-sensitive mutant, at the non-permissive temperature, about half of the Ilv3 is found in the insoluble portion, indicating that Hsp10 is also important for proper folding of Ilv3, but that Hsp60 is required. (Dubaquie et. al. The EMBO Journal 1998 17: 5868-5876).

[0170] Thus, in one embodiment of the present invention, wherein the yeast DHAD encoded by ILV3 gene is used in the cytosol of a isobutanol-producing recombinant microorganism (e.g., a yeast microorganism), Hsp60 and/or Hsp10 from the same yeast, homologs thereof from other microorganisms, or active variants thereof can be overexpressed in said microorganism to increase the activity, solubility, and/or correct folding of DHAD encoded by ILV3 gene to increase the productivity, titer, and/or yield of isobutanol produced. Alternatively, if said microorganism is a yeast and it naturally expresses chaperonin proteins homologous to Hsp60 and/or Hsp10 in its cytosol, DHAD encoded by ILV3 can be expressed in said yeast without the overexpression of the Hsp60 and/or the Hsp10 proteins. In another embodiment, wherein the DHAD derived from an organism other than yeast is used for isobutanol production, chaperonin homologs, or active variants thereof derived from said non-yeast organism or related non-yeast organism can be overexpressed together with the DHAD derived from said non-yeast organism. In one embodiment, said non-yeast organism is an eukaryotic organism. In another embodiment, said non-yeast organism is a prokaryotic organism. In a further embodiment, said non-yeast organism is a bacterium (e.g., E. coli., or Lactococcus lactis). For example, the Lactococcus lactis GroEL and GroES chaperonin proteins are expressed in the yeast cytosol in conjunction with the IlvD from Lactococcus lactis. Overexpression of these genes may be accomplished by methods as described herein.

[0171] Also disclosed herein are recombinant microorganisms comprising one or more genes encoding an iron-sulfur cluster assembly protein. Iron-sulfur cluster assembly for insertion into yeast apo-iron-sulfur proteins begins in yeast mitochondria. To assemble in yeast the active iron-sulfur proteins containing the cluster, either the apo-iron-sulfur protein is imported into the mitochondria from the cytosol and the iron-sulfur cluster is inserted into the protein and the active protein remains localized in the mitochondria; or the iron-sulfur clusters or precursors thereof are exported from the mitochondria to the cytosol and the active protein is assembled in the cytosol or other cellular compartments.

[0172] Targeting of yeast mitochondrial iron-sulfur proteins or non-yeast iron-sulfur proteins to the yeast cytosol can result in such proteins not being properly assembled with their iron-sulfur clusters. This present invention overcomes this problem by co-expression and cytosolic targeting in yeast of proteins for iron-sulfur cluster assembly and cluster insertion into apo-iron-sulfur proteins, including iron-sulfur cluster assembly and insertion proteins from organisms other than yeast, together with the apo-iron-sulfur protein to provide assembly of active iron-sulfur proteins in the yeast cytosol.

[0173] In some embodiments, the present invention provides methods of using Fe—S cluster containing protein in the eukaryotic cytosol for improved isobutanol production in a microorganism, comprising overexpression of a Fe—S cluster-containing protein in the isobutanol production pathway in an microorganism. In a preferred embodiment, said microorganism is a yeast microorganism. In one embodiment, said Fe—S cluster-containing protein is a endogenous protein. In another embodiment, said Fe—S cluster-containing protein is an exogenous protein.

[0174] In one embodiment, said Fe—S cluster-containing protein is derived from a eukaryotic organism. In another embodiment, said Fe—S cluster-containing protein is derived from a prokaryotic organism. In one embodiment, said Fe—S cluster-containing protein is DHAD. In one embodiment, said Fe—S cluster is a 2Fe-2S cluster. In another embodiment, said Fe—S cluster is a 4Fe-4S cluster.

[0175] All known DHAD enzymes contain an iron sulfur cluster, which is assembled in vivo by a multi-component pathway. DHADs contain one of at least two types of iron sulfur clusters, a 2Fe-2S cluster as typified by the spinach enzyme (Flint and Emptage, JBC 1988 263(8): 3558) or a 4Fe-4S cluster as typified by the E. coli enzyme (Flint et. al., JBC 1993 268(20): 14732). In eukaryotic cells, iron-sulfur cluster proteins can be found in either the cytosol or, more commonly, in the mitochondria. Within the mitochondria, a set of proteins, collectively similar to the ISC and/or SUF systems of E. coli, are present and participate in the assembly, maturation, and proper insertion of Fe—S clusters into mitochondrial target proteins. (Lill and Mühlenhoff, 2008, Annu. Rev. Biochem., 77:669-700). In addition, a cytosolic iron sulfur assembly system is present and is collectively termed the CIA machinery. The CIA system promotes proper Fe—S cluster maturation and loading into cytosolically-localized iron sulfur proteins such as Leu1. Importantly, function of the CIA system is dependent on a critical (but still uncharacterized) factor exported from the mitochondria. In the yeast S. cerevisiae, the native DHAD, encoded by ILV3, is a mitochondrially-localized protein, where it is presumably properly recognized and activated by Fe—S cluster insertion by the endogenous machinery. Accordingly, ectopic expression of a DHAD in the yeast cytosol might be not expected to be functional due to its presence in a non-native compartment and the concomitant lack of appropriate Fe—S cluster assembly machinery.

[0176] The E. coli DHAD (encoded by ilvD) is sensitive to oxygen, becoming quickly inactivated when isolated under aerobic conditions (Flint et. al., JBC 1993 268(20): 14732; Brown et. al. Archives Biochem. Biophysics 1995 319(1): 10). It is thought that this oxygen sensitivity is due to the presence of a labile 4Fe-4S cluster, which is unstable in the presence of oxygen and reactive oxygen species, such as oxygen radicals and hydrogen peroxide. In yeast and other eukaryotes, the mitochondrial environment is reducing, i.e. it is a low oxygen environment, in contrast to the more oxygen-rich environment of the cytosol. The redox state of the cytosol is thus expected to be a problem for expressing mitochondrially localized DHADs, which are natively located in the mitochondria, or in expressing DHADs from many bacterial species which typically have an intracellular reducing environment. The spinach DHAD has been shown to be more oxygen resistant than the E. coli enzyme in in vitro assays (Flint and Emptage, JBC 1988 263(8):3558), which may be due to its endogenous localization to the plastid, where it would normally encounter a relatively high-oxygen environment. It has been suggested that DHADs with 2Fe-2S clusters are inherently more resistant to oxidative damage and they are therefore an attractive possibility for inclusion in the cytosolically localized isobutanol pathway.

[0177] An additional complication to the oxygen sensitivity of DHADs is that the iron sulfur clusters must be properly assembled and inserted into the enzyme such that an active enzyme results. There are several types of machinery that produce iron sulfur clusters and properly assemble them into proteins, including the NIF system found in bacteria and in some eukaryotes, the ISC system found in bacteria and mitochondria, the SUF system found in bacteria and plastids, and the CIA system found in the cytosol of eukaryotes.

[0178] Thus, the methods of using Fe—S cluster in the eukaryotic cytosol for improved enzymatic activity in isobutanol production pathway as described above may further comprise the co-expression a heterologous Fe—S cluster-containing DHAD with the NIF assembly system in the yeast cytosol to aid in assembling said heterologous DHADs. The NIF system found in the parasite Entamoeba histolytica has been shown to complement the double deletion of the E. coli ISC and SUF assembly systems (Ali et. al. JBC 2004 279(16): 16863). The critical components of the Entamoeba assembly system comprise only two genes, NifS and NifU. In one embodiment, these two components are overexpressed in the yeast cytosol to increase activity and/or stability of cytosolic DHADs. In one embodiment, the NIF system is the E. hisotlytica NIF system; in another embodiment, the NIF system is from other organisms (e.g. Lactococcus lactis). An advantage of using the E. hisotlytica assembly system is that it has already been demonstrated to work in a heterologous organism, E. coli.

[0179] A 2Fe-2S cluster-containing DHAD can be used in the present invention. In one embodiment, the 2Fe-2S cluster DHADs includes all known 2Fe-2S cluster dehydratase enzymes identified biochemically. In another embodiment, the 2Fe-2S cluster DHADs include those predicted to be 2Fe-2S cluster dehydratases containing some version of the consensus motif for 2Fe-2S cluster proteins, e.g., the motif CX₄CX₂CX_{˜30}C (SEQ ID NO: 39, Lill and Mühlenhoff, 2008, Annu. Rev. Biochem., 77:669-700). For example, based on the extremely highly conserved DHAD gene sequences shared amongst plant species, the inventors have synthesized a likely 2Fe-2S DHAD from Arabidopsis (and rice, Oryza sativa japonica) which can be used to improve isobutanol production in vivo in the cytosolic isobutanol pathway.

[0180] Alternatively, a DHAD may be determined to be a 2Fe-2S protein or a 4Fe-4S protein based on a phylogenetic tree, such as FIG. 3. Sequences not present on the example phylogenetic tree disclosed here could be added to the tree by one skilled in the art. Furthermore, once a new sequence was added to the DHAD phylogenetic tree, one skilled in the art may be able to determine if it is a 2Fe-2S or a 4Fe-4S cluster containing protein based on the phylogenetic relationship to known 2Fe-2S or a 4Fe-4S cluster containing DHADs.

[0181] In another embodiment, a 4Fe-4S cluster-containing DHAD could substitute for the 2Fe-2S cluster-containing DHAD in the cytosol. In one embodiment, said 4Fe-4S cluster DHAD is engineered to be oxygen resistant, and therefore more active in the cytosol of cells grown under aerobic conditions.

[0182] In one embodiment of this invention, the apo-iron-sulfur protein DHAD enzyme encoded by the E. coli ilvD gene is expressed in yeast together with E. coli iron-sulfur cluster assembly and insertion genes comprising either the cyaY, iscS, iscU, iscA, hscB, hscA, fdx and isuX genes or the sufA, sufB, sufC, sufD, sufS and sufE genes. This strategy allows for both the apo-iron-sulfur protein (DHAD) and the iron-sulfur cluster assembly and insertion components (the products of the isc or suf genes) to come from the same organism, causing assembly of the active DHAD iron-sulfur protein in the yeast cytosol. As a modification of this embodiment, for those E. coli iron-sulfur cluster assembly and insertion components that localize to or are predicted to localize to the yeast mitochondria upon expression in yeast, the genes for these components are engineered to eliminate such targeting signals to ensure localization of the components in the yeast cytoplasm. Thus, in some embodiments, one or more genes encoding an iron-sulfur cluster assembly protein may be mutated or modified to remove a signal peptide, whereby localization of the product of said one or more genes to the mitochondria is prevented. In certain embodiments, it may be preferable to overexpress one or more genes encoding an iron-sulfur cluster assembly protein.

[0183] In additional embodiments, iron-sulfur cluster assembly and insertion components from other than E. coli can be co-expressed with the E. coli DHAD protein to provide assembly of the active DHAD iron-sulfur cluster protein. Such iron-sulfur cluster assembly and insertion components from other organisms can consist of the products of the Helicobacter pylori nifS and nifU genes or the Entamoeba histolytica nifS and nifU genes. As a modification of this embodiment, for those non-E. coli iron-sulfur cluster assembly and insertion components that localize to or are predicted to localize to the yeast mitochondria upon expression in yeast, the genes for these components can be engineered to eliminate such targeting signals to ensure localization of the components in the yeast cytoplasm.

[0184] As a further modification of this embodiment, in addition to co-expression of these proteins in aerobically-grown yeast, these proteins may be co-expressed in anaerobically-grown yeast to lower the redox state of the yeast cytoplasm to improve assembly of the active iron-sulfur protein.

[0185] In another embodiment, the above iron-sulfur cluster assembly and insertion components can be co-expressed with DHAD apo-iron-sulfur enzymes other than the E. coli IlvD gene product to generate active DHAD enzymes in the yeast cytoplasm. As a modification of this embodiment, for those DHAD enzymes that localize to or are predicted to localize to the yeast mitochondria upon expression in yeast, then the genes for these enzymes can be engineered to eliminate such targeting signals to ensure localization of the enzymes in the yeast cytoplasm.

[0186] In additional embodiments, the above methods used to generate active DHAD enzymes localized to yeast cytoplasm may be combined with methods to generate active acetolactate synthase, KARI, KIVD and ADH enzymes in the same yeast for the production of isobutanol by yeast.

[0187] In another embodiment, production of active iron-sulfur proteins other than DHAD enzymes in yeast cytoplasm can be accomplished by co-expression with iron-sulfur cluster assembly and insertion proteins from organisms other than yeast, with proper targeting of the proteins to the yeast cytoplasm if necessary and expression in anaerobically growing yeast if needed to improve assembly of the active proteins.

[0188] In another embodiment, the iron-sulfur cluster assembly protein encoding genes may be derived from eukaryotic organisms, including, but not limited to yeasts and plants. In one embodiment, the iron-sulfur cluster protein encoding genes are derived from a yeast organism, including, but not limited to S. cerevisiae. In specific embodiments, the yeast-derived genes encoding iron-sulfur cluster assembly proteins are selected from the group consisting of Cfd1 (accession no. NP_{—}012263.1), Nbp35 (accession no. NP_{—}011424.1), Nar1 (accession no. NP_{—}014159.1), Cia1 (accession no. NP_{—}010553.1), and homologs or variants thereof. In a further embodiment, the iron-sulfur cluster assembly protein encoding genes may be derived from plant nuclear genes which encode proteins translocated to chloroplasts or plant genes found in the chloroplast genome itself.

[0189] In certain embodiments described herein, it may be desirable to reduce or eliminate the activity and/or proteins levels of one or more iron-sulfur cluster containing cytosolic proteins. This modification increases the capacity of a yeast to incorporate [Fe—S] clusters into cytosolically expressed proteins wherein said proteins can be native proteins that are expressed in a non-native compartment or heterologous proteins. This is achieved by deletion of a highly expressed native cytoplasmic [Fe—S]-dependent protein. More specifically, the gene LEU1 is deleted coding for the 3-isopropylmalate dehydratase which catalyses the conversion of 3-isopropylmalate into 2-isopropylmaleate as part of the leucine biosynthetic pathway in yeast. Leu1p contains an 4Fe-4S cluster which takes part in the catalysis of the dehydratase. Some DHAD enzymes also contain a 4Fe-4S cluster involved in its dehydratase activity. Therefore, although the two enzymes have different substrate preferences the process of incorporation of the Fe—S cluster is generally similar for the two proteins. Given that Leu1p is present in yeast at 10000 molecules per cell (Ghaemmaghami S. et al. Nature 2003 425: 737), deletion of LEU1 therefore ensures that the cell has enough spare capacity to incorporate [Fe—S] clusters into at least 10000 molecules of cytosolically expressed DHAD. Taking into account the specific activity of DHAD (E. coli DHAD is reported to have a specific activity of 63 U/mg (Flint, D. H. et al., JBC 1993 268: 14732), the LEU1 deletion yeast strain would generally exhibit an increased capacity for DHAD activity in the cytosol as measured in cell lysate.

[0190] In alternative embodiments, it may be desirable to further overexpress an additional enzyme that converts 2,3-dihydroxyisovalerate to ketoisovalerate in the cytosol. In a specific embodiment, the enzyme may be selected from the group consisting of 3-isopropylmalate dehydratase (Leu1p) and imidazoleglycerol-phosphate dehydrogenase (His3p) or other dehydratases listed in Table 3.

TABLE 3
Dehydratases with putative activity
towards 2,3-dihydroxyisovalerate.

| Gene | Species | Native Substrate | Comments |
|---|---|---|---|
| dgoD | E. coli | D-galactonate | Acid-sugar |
| rspA | E. coli | D-mannonate, | dehydratases |
| | | D-altronate | |
| yfaW | E. coli | L-rhamnonate | |
| fucD | X. campestris | L-fuconate | |
| LGD1 | H. jecorina | L-galactonate | |
| pdd | K. oxytoca | diols | Other non-Fe—S |
| ENO1/2, | S. cerevisiae | 2-phosphoglycerate | dehydratases |
| ERR1/2/3 | | | |
| HIS3 | S. cerevisiae | Imidazoleglycerol- | |
| | | phosphate | |

[0191] Because in some embodiments, DHAD activity may be limited in the cytosol, alternative dehydratases that convert dihydroxyisovalerate (DHIV) to 2-ketoisovalerate (KIV) and are physiologically localized to the yeast cytosol may be utilized. Leu1p and His3p and other enzymes encoded by genes listed in Table 3 are dehydratases that potentially may exhibit affinity for DHIV. Leu1p is an Fe—S binding protein that is involved in leucine biosynthesis and is also normally localized to the cytosol. His3p is involved in histidine biosynthesis and is similar to Leu1p, it is generally localized to the cytosol or predicted to be localized to the cytosol. This modification overcomes the problem of a DHAD that is limiting isobutanol production in the cytosol of yeast. The use of an alternative dehydratase that has activity in the cytosol with a low activity towards DHIV may thus be used in place of the DHAD in the isobutanol pathway. As described herein, such enzyme may be further engineered to increase activity with DHIV.

### Increased Mitochondrial Export of Essential Components for Iron Sulfur Protein Assembly in the Cytosol

[0192] As noted herein, the third step in an exemplary isobutanol biosynthetic pathway is the conversion of dihydroxyisovalerate (DHIV) to ketoisovalerate (KIV) by a dihydroxyacid dehydratase (DHAD). DHADs often require iron sulfur clusters for activity, and the native yeast DHAD acquires its iron sulfur cluster via the mitochondrial ISC machinery, remaining within the mitochondria as an active enzyme. However, isobutanol production by the engineered pathway requires DHAD to be functionally expressed within the cytosol, and such a DHAD presumably requires iron sulfur clusters to be added in the cytosol. One of the inventions disclosed herein addresses possible genetic or chemical approaches to increase the functional activity of cytosol DHADs. The present invention provides ways to increase the export of an essential compound that is generated in mitochondria, thereby increasing the amount of the compound available for use by the cytosolic iron sulfur assembly machinery (e.g. CIA) to effectively increase the functional expression of cytosolic DHADs.

### Overexpressing Mitochondrial Iron Sulfur Cluster (ISC) Machinery

[0193] The compound generated within the mitochondrial matrix that is essential for iron sulfur protein assembly in the cytosol is subsequently exported through the ABC transporter, Atm1, and is chaperoned across the intermembrane space of the mitochondria to the cytosol by Erv1 (reviewed in Lill and Mühlenhoff, 2008, Annu. Rev. Biochem., 77:669-700). Sc_BAT1 was identified as a third putative component of the mitochondrial export machinery required for the export of an unknown compound essential for cytosolic iron-sulfur cluster biosynthesis from the mitochondrial matrix to the cytosol by a genetic selection of suppressors of a Sc_atm1 temperature sensitive allele (Kispal et al, 1996, JBC, 271:24458-24464). It is also suggested that a further strong indication for a direct functional relationship between Atm1p and Bat1p is the leucine auxotrophy associated with the deletion of the ATM1 gene.

[0194] To facilitate export of the essential compound, the present invention provides in an embodiment recombinant microorganisms that have been engineered to overexpress one or more mitochondrial export proteins. In various embodiments described herein, the mitochondrial export protein may be selected from the group consisting of the S. cerevisiae ATM1, the S. cerevisiae ERV1, and the S. cerevisiae BAT1, or homologs thereof. Such manipulations can increase the export of the essential compound out of the mitochondria to increase the amount available for use by the cytosolic iron sulfur assembly machinery (e.g. CIA) to effectively increase the functional expression of cytosolic DHADs.

### Increasing Inner Mitochondrial Membrane Electrical Potential

[0195] In one embodiment, the present invention provides recombinant microorganisms that have further been engineered to increase inner mitochondrial membrane potential, Δψ_{M}. As described herein, although yeast cells require a function mitochondrial compartment, they are viable without the mitochondrial genome (mtDNA). However, loss of mtDNA has been linked to destabilization of the nuclear genome (Veatch et al., 2009, Cell, 137(7):1179-1181). Nuclear genome stability was restored in yeast lacking mtDNA when a suppressor mutation (ATP1-111) was introduced (Veatch et al., 2009, Cell, 137(7):1179-1181, Francis et al, 2007, J. Bioenerg. Biomembr. 39(2):149-157). The mutation has been shown to increase ATP hydrolysis activity of the mitochondrial ATP synthase, and similar mutations in the ATP synthase complex have also been shown to increase the electrical potential across the inner membrane of mitochondria, Δψ_{M}, in cells lacking mtDNA (Smith et al., 2005, Euk Cell, 4(12):2057-2065; Kominsky et al., 2002, Genetics, 162:1595-1604). Generation of Δψ_{M} is required for efficient import of proteins into the mitochondrial matrix, including those involved in assembly and export of a complex required for the assembly of iron sulfur clusters into proteins in the cytosol. The link between Δψ_{M} and iron sulfur cluster assembly in the cytosol is supported by microarray data that indicate that the transcriptional profile of cells lacking mtDNA (decreased Δψ_{M}) is similar to yeast grown under iron depletion conditions (Veatch et al., 2009, Cell, 137(7):1179-1181). Introduction of the ATP1-111 suppressor mutation restores the transcriptional profile to one resembling a wild-type cell's transcriptional profile (Veatch et al., 2009, Cell, 137(7):1179-1181). Taken together, these data indicate that Δψ_{M} must be sufficient to support assembly of cytosolic iron sulfur proteins, particularly those involved in nuclear genome stability (Veatch et al., Cell 2009, 137(7):1247-1258).

[0196] Thus, the present invention aims to generate the highest possible Δψ_{M} in a yeast with an intact mitochondrial genome, allowing for the maximization the export of the complex required for assembly of cytosolic iron sulfur proteins, which can in turn increase the amount available for use by the cytosolic iron sulfur assembly machinery (e.g. CIA) to effectively increase the functional expression of cytosolic DHADs. Δψ_{M} can be maximized several different ways, including, but not limited to: (1) Introducing mutations in the mitochondrial ATP synthase complex that increase ATP hydrolysis activity, or active variants thereof; (2) Overexpressing an ATP/ADP carrier protein that leads to an increase ATP⁴⁻ import into the mitochondrial matrix in exchange for ADP³⁻, contributing to generation of Δψ_{M}; (3) Removal and/or overexpression of additional gene(s) involved in generation of Δψ_{M}; and (4) Addition of chemical reagents that lead to an increase in Δψ_{M}.

[0197] In various embodiments described herein, the recombinant microorganism may comprise a mutation in the mitochondrial ATP synthase complex that increases ATP hydrolysis activity. In one embodiment, said mutant mitochondrial is an ATP synthase which can increase ATP hydrolysis activity is from a eukaryotic organism (e.g., a yeast ATP1, ATP2, ATP3). In another embodiment, said mutant mitochondrial ATP synthase is from a prokaryotic organism (e.g., bacteria). Non-limiting examples of said mutant mitochondrial ATP synthase include, mutant ATPase from the ATP1-111 strain in Francis et al., J Bioenerg Biomembr, 2007, 39(2):127-144), a mutant ATPase from the atp2-227 strain in Smith et al., 2005, Euk Cell, 4(12):2057-2065, or a mutant ATPase from the yme1 strain in Kominsky et al., 2002, Genetics, 162:1595-1604). In another embodiment, active variants, or homologs of the mutant mitochondrial ATP synthases described above can be applied. In one embodiment, an ATP synthase having a homology to any of ATP1, ATP2, and ATP3 of at least about 70%, at least about 80%, or at least about 90% similarity can be used for a similar purpose.

[0198] In one embodiment, the inner mitochondrial membrane electrical potential can be increased by overexpressing an ATP/ADP carrier protein. Overexpression of the ATP/ADP carrier protein increases ATP⁴⁻ import into the mitochondrial matrix in exchange for ADP³⁻. Non-limiting examples of ATP/ADP carrier proteins include the S. cerevisiae_AAC1 or the S. cerevisiae_AAC3, and active variants or homologs thereof. In one embodiment, an ATP/ADP carrier protein having a homology to either the S. cerevisiae_AAC1 or S. cerevisiae_AAC3 of at least about 70%, at least about 80%, or at least about 90% similarity can be used for a similar purpose.

[0199] In another embodiment, the inner mitochondrial membrane electrical potential can be increased by removal and/or overexpression of additional gene(s) involved in the generation of Δψ_{M}. A person skilled in the art will be familiar with proteins encoded by such genes. Non-limiting examples include the protein complexes in the mitochondrial electron transport chain which are responsible for establishing H⁺ ions gradient. For examples, complexes on the inner membrane of mitochondria that are involved in conversion of NADH to NAD⁺ (Complex I, NADH dehydrogenase), succinate to fumarate (Complex II, cytochrome bc₁ complex), and oxygen to water (Complex IV, cytochrome c oxidase), which are responsible for the transfer of H⁺ ions. In another embodiment, enzymes in the citric acid cycle in the matrix of mitochondria can be overexpressed to increase NADH and succinate production, such that more H⁺ ions are available. These enzymes include, citrate synthase, aconitase, isocitrate dehydrogenase, α-Ketoglutarate dehydrogenase, succinyl-CoA synthetase, succinate dehydrogenase, fumarase, and malate dehydrogenase.

[0200] In yet another embodiment, the inner mitochondrial membrane electrical potential can be increased by the addition of chemical reagents that lead to an increase in Δψ_{M}. In one embodiment, said chemical reagents are substrates in the citric acid cycle in the matrix of mitochondria, wherein when added into the culture, more NADH and succinate can be produced which in turn increase Δψ_{M} in the mitochondria. Non-limiting examples of said substrates include, oxaloacetate, acetyl CoA, citrate, cis-Aconitate, isocitrate, oxalosuccinate, α-Ketoglutarate, succinyl-CoA, succinate, fumarate and L-Malate.

### Enhancing Cytosolic DHADs Activity by Increasing Cytosol Sulfur Levels

[0201] Also provided herein are methods of increasing the levels of sulfur-containing compounds within yeast cells, including the amino acid cysteine, such that this sulfur is more available for the production of iron-sulfur cluster-containing proteins in the yeast cytosol or mitochondria. Specifically, by increasing the concentration of sulfur-containing compounds in the cell such, the activity of a functional DHAD is enhanced in the yeast cytosol or mitochondria.

[0202] Accordingly, the present invention provides in an embodiment recombinant microorganisms that have been engineered to overexpress one or more genes to increase biosynthesis of cysteine or uptake of exogenous cysteine by the cell in order to increase the amount and availability of sulfur-containing compounds for the production of active iron-sulfur cluster-containing proteins in the yeast cytosol or mitochondria. In one embodiment, the recombinant microorganisms have been engineered to increase the expression of one or more proteins to increase cysteine biosynthesis by the cell, including, but not limited to MET3, MET14, MET16, MET10, MET5, MET1, MET8, MET2, MET17, HOM3, HOM2, HOME, CYS3, CYS4, SUL1, SUL2, active variants thereof, homologs thereof, and combination thereof, to increase cysteine biosynthesis by the cell. In another embodiment, the recombinant microorganisms have been engineered to increase the expression of one or more transport proteins, including, but not limited to YCT1, MUP1, GAP1, AGP1, GNP1, BAP1, BAP2, TAT1, active variants thereof, homologs thereof, and combination thereof.

[0203] As noted above, increasing uptake of exogenous cysteine by the cell will increase the amount and availability of sulfur-containing compounds for the production of active iron-sulfur cluster containing proteins in the cytosol or mitochondria of the cell. Addition of increased exogenous cysteine to yeast cells, separately from or in addition to increased expression of the transport protein-encoding genes as described above, can also increase the level and availability of sulfur-containing compounds within the cell such that the sulfur is more available for the production of iron-sulfur cluster-containing proteins in the cell cytosol or mitochondria.

[0204] Sulfur is a necessary element for the biogenesis of iron-sulfur cluster (FeS cluster)-containing protein in vivo. Sulfur is a component of the FeS clusters that are incorporated into such proteins and is also a component of compounds such as glutathiones, which are essential for FeS cluster biogenesis in many organisms as well as being involved in cellular redox homeostasis. The direct source of the sulfur for these processes in many organisms is the amino acid cysteine. The sulfur from cysteine is mobilized into FeS clusters during FeS cluster biogenesis using cysteine desulfurase proteins identified in many organisms such as IscS, SufS (together with SufE), NifS and Nfs1 (together with Isd11). Additionally, glutathione biosynthesis requires cysteine.

[0205] Increased expression of Fe—S cluster-containing proteins in organisms such as the budding yeast S. cerevisiae results in an increased demand for sulfur, in the form of cysteine, in the cell. Such an increased demand for cysteine may possibly be met by natural induction of the endogenous cysteine biosynthetic pathway but maximal natural induction of this pathway may be insufficient to provide enough cysteine for the proper assemble and maintenance of increased levels of FeS cluster-containing proteins in the cell. Such cells with an increased demand for cysteine may also induce cysteine and/or sulfate transport pathways to bring in exogenous cysteine for or sulfate, which is the sulfur donor for cysteine biosynthesis. However, maximal natural induction of these transport systems may also be insufficient to meet the sulfur requirement of such cells.

[0206] Assembly of active FeS cluster-containing proteins in the native yeast cytosol requires the production and export to the cytosol by the mitochondria of an unidentified sulfur-containing compound derived from the mitochondrial FeS cluster biogenesis pathway and the amino acid cysteine and requiring glutathione for export. Overexpression of an FeS cluster-containing protein in the yeast cytosol or the localization of a previously non-cytosolic FeS cluster-containing protein to the yeast cytosol may result in the decreased availability of this unidentified sulfur-containing compound in the yeast cytosol and low activity of the cytosolic FeS cluster-containing protein or proteins. Increased availability of cysteine to the cell may prevent this limitation by providing increased sulfur for the biosynthesis of this compound and sufficient glutathione for its export from the mitochondria.

[0207] Sulfur for the assembly of FeS cluster-containing proteins expressed in the yeast cytosol may also be provided by localization of cysteine desulfurase proteins to the yeast cytosol. Expression of such proteins in the yeast cytosol may result in an increased demand for cysteine by such cells, especially in the cytosol. Additionally, damage to the FeS cluster of FeS cluster-containing proteins expressed in the yeast cytosol, due to the oxic nature of the yeast cytosol or due to reactive oxygen or nitrogen species, may require additional sulfur derived from cysteine for repair or regeneration of the damaged clusters. As well, additional sulfur derived from cysteine may modulate the redox balance of the yeast cytosol through the production of increased levels of compounds such as glutathione which may positively affect the assembly or activity of FeS cluster-containing proteins in the yeast cytosol.

[0208] Increased cellular sulfur in the form of cysteine can be provided by increasing the biosynthesis of cysteine in the cell or by increasing cellular uptake of exogenous cysteine. Increasing the cellular level of cysteine in these ways is expected to increase the level of other sulfur-containing compounds in the cell that derive their sulfur from cysteine or the cysteine biosynthesis pathway. Cysteine biosynthesis in S. cerevisiae involves the uptake of exogenous sulfate by transport proteins encoded by the SUL1 and/or SUL2 genes and the action of the proteins encoded by the MET3, MET14, MET16, MET10, MET5, MET1, MET8, MET2, MET17, HOM3, HOM2, HOME, CYS4 and CYS4 genes. Exogenous cysteine is taken up into S. cerevisiae by the high-affinity transport system encoded by the YCT1 gene but also by the broader-specificity transport proteins encoded by the MUP1, GAP1, AGP1, GNP1, BAP1, BAP2, TAT1 and TAT2 genes.

[0209] Thus, in an additional aspect, the invention is directed to methods of increasing the levels of sulfur-containing compounds within the yeast cytosol and/or mitochondria, such that sulfur is more available for the production of iron-sulfur cluster-containing proteins in the cytosol or mitochondria. In one embodiment, the levels of sulfur-containing compounds within the yeast cytosol and/or mitochondria are increased. In another embodiment, an increase in sulfur-containing compounds in the yeast cytosol or mitochondria leads to an increase in activity of a cytosolically expressed FeS cluster-containing protein DHAD, which catalyzes the reaction of 2,3-dihydroxyisovalerate to 2-ketoisovalerate. In another embodiment, an increase in sulfur-containing compounds in the yeast cytosol or mitochondria leads to an increase in activity of a cytosolically expressed DHAD. In another embodiment, an increase in sulfur-containing compounds in the yeast cytosol and/or mitochondria leads to an increase in activity of a cytosolically expressed DHAD and a subsequent increase in the productivity, titer, and/or yield of isobutanol produced by the DHAD-containing strain. In another embodiment, an increase in sulfur-containing compounds in the yeast cytosol or mitochondria leads to an increase in activity of a mitochondrially expressed FeS cluster-containing protein DHAD, which catalyzes the reaction of 2,3-dihydroxyisovalerate to 2-ketoisovalerate. In another embodiment, an increase in sulfur-containing compounds in the yeast cytosol or mitochondria leads to an increase in activity of a mitochondrially expressed DHAD. In another embodiment, an increase in sulfur-containing compounds in the yeast cytosol and/or mitochondria leads to an increase in activity of a mitochondrially expressed DHAD and a subsequent increase in the productivity, titer, and/or yield of isobutanol produced by the DHAD-containing strain.

[0210] In another embodiment, the genes YCT1, MUP1, GAP1, AGP1, GNP1, BAP1, BAP2, TAT1, and TAT2, active variants thereof, homologs thereof or combination thereof are overexpressed from a plasmid or by inserting multiple copies of the gene or genes into the chromosome under the control of a constitutive promoter. This embodiment can also be combined with providing increased extracellular cysteine to the yeast cells to provide increased sulfur-containing compounds in the cytosol and/or mitochondria of the cells. Overexpression of these genes may be accomplished by methods as described above.

[0211] In another embodiment, providing increased extracellular cysteine to the yeast cells in the absence of any additional engineered expression of transport proteins will provide increased sulfur containing compounds in the cytosol and/or mitochondria of the cells for the improved production of active FeS cluster-containing proteins in the yeast cytosol or mitochondria, which leads to increased isobutanol productivity, titer, and/or yield by the cell.

### Enhancing Cytosolic DHAD Activity by Mitigating Oxidative Species or Oxidative Stress

[0212] The present application also describes methods of protecting enzymes in a DHAD-requiring biosynthetic pathway (specifically DHAD) in a microorganism to increase the production of beneficial metabolites by mitigating oxidative species or oxidative stress induced damage in the cytosol of said microorganism. Non-limiting examples of oxidative species include, nitric oxide (NO), reactive nitrogen species (RNS), reactive oxygen species (ROS), hydroxyl radical species, organic hydroperoxide, hypochlorous acids, and combinations thereof. As used herein, the phrase “reactive oxygen species” or “ROS” refers to free radicals that contain the oxygen atom. ROS are very small molecules that include oxygen ions and peroxides and can be either inorganic or organic. They are highly reactive due to the presence of unpaired valence shell electrons. During times of environmental stress (e.g. UV or heat exposure) ROS levels can increase dramatically, which can result in significant damage to cell structures. This cumulates into a situation known as oxidative stress. ROS are also generated by exogenous sources such as ionizing radiation.

[0213] Oxidative stress is caused by an imbalance between the production of reactive oxygen and a biological system's ability to readily detoxify the reactive intermediates or easily repair the resulting damage. All forms of life maintain a reducing environment within their cells. This reducing environment is preserved by enzymes that maintain the reduced state through a constant input of metabolic energy. Disturbances in this normal redox state can cause toxic effects through the production of peroxides and free radicals that damage all components of the cell, including proteins, lipids, and DNA.

[0214] In chemical terms, oxidative stress is a large rise (becoming less negative) in the cellular reduction potential, or a large decrease in the reducing capacity of the cellular redox couples, such as glutathione. The effects of oxidative stress depend upon the size of these changes, with a cell being able to overcome small perturbations and regain its original state. However, more severe oxidative stress can cause cell death and even moderate oxidation can trigger apoptosis, while more intense stresses may cause necrosis.

[0215] A particularly destructive aspect of oxidative stress is the production of reactive oxygen species, which include free radicals and peroxides, and/or other reactive species. Some of the less reactive of these species (such as superoxide) can be converted by oxidoreduction reactions with transition metals or other redox cycling compounds (including quinones) into more aggressive radical species that can cause extensive cellular damage. The major portion of long term effects is inflicted by damage on DNA. Most of these oxygen-derived species are produced at a low level by normal aerobic metabolism and the damage they cause to cells is constantly repaired. However, under the severe levels of oxidative stress that cause necrosis, the damage causes ATP depletion, preventing controlled apoptotic death and causing the cell to simply fall apart. Non-limiting example of oxidants include, superoxide anion (.O₂—, formed in many autoxidation reactions and by the electron transport chain), hydrogen peroxide (H₂O₂, formed by disputation of .O₂— or by direct reduction of O₂), organic hydroperoxide (ROOH, formed by radical reactions with cellular components such as lipids and/or nucleobases), oxygen centered organic radicals (e.g., RO. alkoxy and ROO., peroxy radicals, formed in the presence of oxygen by radical addition to double bonds or hydrogen abstraction), hypochlorous acid (HOCl, formed from H₂O₂ by myeloperoxidase, and peroxynitrite (ONOO—, formed in a rapid reaction between .O₂— and NO.).

[0216] Biological defenses against oxidative damage include protective proteins that remove reactive oxygen species, molecules that sequester metal ions, and enzymes that repair damaged cellular components. Oxidative stress can be defined as a disturbance in the prooxidant-antioxidant balance in favor of prooxidants. One such class of prooxidants are reactive oxygen species, or ROS. ROS are highly reactive species of oxygen, such as superoxide (O2.⁻), hydrogen peroxide (H₂O₂), and hydroxyl radicals (OH.), produced within the cell, usually as side products of aerobic respiration. By some reports, as much as 2% of the oxygen that enters the respiratory chain is converted to superoxide through a one-electron reduction of oxygen. A small amount of superoxide radical is always released from the enzyme when oxygen is reduced by electron carriers such as flavoproteins or cytochromes. This is because the electrons are transferred to oxygen one at a time. The hydroxyl radical and hydrogen peroxide are derived from the superoxide radical.

[0217] Many microbes possess native enzymes to detoxify these ROS. One example of such a system is superoxide dismutase (SOD) plus catalase. SOD catalyzes a reaction where one superoxide radical transfers its extra electron to the second radical, which is then reduced to hydrogen peroxide. Catalase catalyzes the transfer of two electrons from one hydrogen peroxide molecule to the second, oxidizing the first to oxygen and reducing the second to two molecules of water. If the hydrogen peroxide is not disposed of, then it can oxidize transition metals, such as free iron(II) in the Fenton reaction, and form the free hydroxyl radical, OH. No known mechanisms exists to detoxify hydroxyl radicals, and thus protection from toxic forms of oxygen must rely on eliminating superoxide and hydrogen peroxide.

[0218] In yeast, to counteract damage of oxidative stress, there are several antioxidant systems with an apparent functional redundancy. For example, there are detoxifying enzymes such as catalases, cytochrome c peroxidase, glutathione peroxidases, glytaredoxins and peroxiredoxins, and many isoforms in distinct cellular compartments (Jamieson et al., 1998, Yeast. 14:1511-1527; Grant et al., 2001, Mol. Microbiol 39:533-541; Collinson et al., 2003, J. Biol. Chem. 278:22492-22497; Park et al., 2000, J. Biol. Chem. 275:5723-5732).

[0219] As described above, an enzyme involved in the isobutanol production pathway, dihydroxyacid dehydratase (DHAD), contains an iron-sulfur (FeS) cluster domain. This iron-sulfur (FeS) cluster domain is sensitive to damage by ROS, which can lead to inactive enzyme. Both 2Fe-2S and 4Fe-4S DHAD enzymes may be susceptible to inactivation by ROS, however direct evidence exists for inactivation of 4Fe-4S cluster containing proteins, such as homoaconitase and isopropylmalate dehydratase in yeast and DHAD and fumarase from E. coli. Therefore, to achieve a functional DHAD expressed in the yeast cytosol in an environment where a substantial amount of ROS may exist from respiration, it may be beneficial to protect the DHAD enzyme from ROS inactivation or oxidative stress through expression of on or more enzymes that reduce or eliminate ROS from the cell.

[0220] To mitigate the potential harmful effects of reactive oxygen species (ROS) or oxidative stress on DHAD in the yeast cytosol, the present inventors have devised several strategies to protect or repair the DHAD from ROS damage. In various embodiments described herein, the invention provides recombinant microorganisms that have been engineered to express one or more proteins in the cytosol that reduce the concentration of reactive oxygen species (ROS) in said cytosol.

[0221] In one embodiment, enzymes that reduce or eliminate the amount of ROS in the cytosol are expressed and targeted to the yeast cytosol. Specifically, enzymes such as catalase, superoxide dismutase (SOD), cytochrome c peroxidase, glutathione peroxidases, glytaredoxins, peroxiredoxins, metallothioneins, and methionine sulphoxide reductases, or any isoforms thereof are expressed, such that they lead to reduction in ROS such as hydrogen peroxide, superoxide, peroxide radicals, and other ROS in the yeast cytosol.

[0222] In one embodiment, a catalase is expressed to reduce the concentration of ROS in the cytosol. In another embodiment, a superoxide dismutase (SOD) is expressed to reduce the concentration of ROS in the cytosol. Usually, microbes that grow by aerobic respiration possess one or both of SOD and catalase. For example, the bacterium E. coli and the yeast Saccharomyces cerevisiae each possesses at least one native SOD and catalase (e.g., SOD1 or SOD2 from yeast). In E. coli, the genes katG and katE encode catalase enzymes, and the genes sodA, sodB and sodC encode SodA, SodB, and SodC superoxide dismutase enzymes. respectively. In S. cerevisiae, the genes CTT1 and CTA1 encode catalase CTT1 and CTA1 enzymes, and the genes SOD1 and SOD2 encode SOD1 and SOD2 superoxide dismutase enzymes. Many other organisms possess catalase and SOD enzymes and these genes may also be useful for reduction of ROS in the yeast cytosol. In one embodiment, SOD homologs from species other than E. coli or yeast can be expressed in yeast cytosol to reduce oxidative stress. In one embodiment, said other species is a plant or a fungus. For example, SOD1 from N. crassa (fungus) may be functionally expressed in the yeast cytosol. In various embodiments described herein, active variants or homologs of the above-described catalases and SODs can be functionally expressed in the yeast cytosol. In another embodiment, protein having a homology to any one of the catalases or SODs described above possessing at least about 70%, at least about 80%, or at least about 90% similarity can be functionally expressed in the yeast cytosol.

[0223] In one embodiment, the catalase genes from E. coli are expressed in and targeted to the cytosol of yeast to reduce the amount of ROS and increase the activity of DHAD also expressed in and targeted to the yeast cytosol. In another embodiment, the catalase genes from S. cerevisiae are overexpressed in and targeted to the cytosol of yeast to reduce the amount of ROS and increase the activity of DHAD also expressed in and targeted to the yeast cytosol. In one embodiment, the SOD genes from E. coli are expressed in and targeted to the cytosol of yeast to reduce the amount of ROS and increase the activity of DHAD also expressed in and targeted to the yeast cytosol. In another embodiment, the SOD genes from S. cerevisiae are expressed in and targeted to the cytosol of yeast to reduce the amount of ROS and increase the activity of DHAD also expressed in and targeted to the yeast cytosol. In another embodiment, promoters of native genes are altered, such that the level of SOD or catalase in the S. cerevisiae cytosol is increased. In yet another embodiment, expression of SOD or catalase in the yeast cytosol is mediated by a plasmid. In yet another embodiment, expression of SOD or catalase in the yeast cytosol is mediated by expression of one or more copies of the gene from the chromosome. Other homologs of catalase or SOD may be identified by one skilled in the art through tools such as BLAST and sequence alignment. These other homologs may be expressed in a similar manner described above to achieve a functional catalase or SOD in the yeast cytosol.

[0224] In another embodiment, a methionine sulphoxide reductase enzyme is expressed to reduce the amount of ROS and protect DHAD from ROS damage and inactivation. In one embodiment, the methionine sulphoxide reductase may be derived from a eukaryotic organism (e.g., a yeast, fungus, or plant). In another embodiment, the methionine sulphoxide reductases may be derived from a prokaryotic organism (e.g., E. coli). The principal enzymatic mechanism for reversing protein oxidation acts on the oxidation product of just one amino acid residue, methionine. This specificity for Met reflects the fact that Met is particularly susceptible to oxidation compared with other amino acids. Methionine sulphoxide reductases (MSRs) are conserved across nearly all organisms from bacteria to humans, and have been the focus of considerable attention in recent years. Two MSR activities have been characterized in the yeast Saccharomyces cerevisiae: MsrA (encoded by MXR1) reduces the S stereoisomer of methionine sulphoxide (MetO), while MsrB (encoded by the YCL033c ORF), which we term here MXR2) reduces the R stereoisomer of MetO. Consistent with defense against oxidative damage, mutants deficient in MSR activity are hypersensitive to pro-oxidants such as H₂O₂, paraquat and Cr, while MSR overexpression enhances resistance. Besides methionine residues, iron-sulfur (FeS) clusters are exquisitely ROS-sensitive components of many cellular proteins. It has been reported that MSR activity helps to preserve the function of cellular FeS clusters.

[0225] In one embodiment, the methionine sulphoxide reductase genes from S. cerevisiae are expressed in and targeted to the cytosol of yeast to reduce the amount of ROS and increase the activity of DHAD also expressed in and targeted to the yeast cytosol. Specifically, the S. cerevisiae methionine sulphoxide reductase genes MsrA (encoded by MXR1) and MsrB (encoded by the YCL033c ORF) are expressed in and targeted to the cytosol of yeast to reduce the amount of ROS and increase the activity of DHAD also expressed in and targeted to the yeast cytosol. The resulting methionine sulphoxide reductase expressing strain will generally demonstrate improved isobutanol productivity, titer, and/or yield compared to the parental strain that does not comprise methionine sulphoxide reductase genes that are expressed in and targeted to the cytosol. Methionine sulphoxide reductases from other organisms, such as bacteria, may be identified by sequence homology using tools such as BLAST and pairwise sequence alignments by one skilled in the art.

[0226] In yet another embodiment, expression or overexpression of glutathione synthesis enzymes, for example GSH1, leads to increased glutathione in the cell and protection of the DHAD enzyme in the yeast cytosol. In one embodiment, said enzymes are derived from a bacteria (e.g., E. coli.). In another embodiment, said enzymes are derived from yeast (e.g., S. cerevisiae). In yet another embodiment, said enzymes are derived from a yeast species different from the yeast used for isobutanol production.

[0227] In one embodiment, one or more metallothionein proteins are expressed in the yeast cytosol to mitigate oxidative stress. Metallothioneins are a family of proteins found in many organisms including yeast and mammals. The biologic function of metallothionein (MT) has been a perplexing topic ever since the discovery of this protein. Many studies have suggested that MT plays a role in the homeostasis of essential metals such as zinc and copper, detoxification of toxic metals such as cadmium, and protection against oxidative stress. MT contains high levels of sulfur. The mutual affinity of sulfur for transition metals makes the binding of these metals to MT thermodynamically stable. Under physiologic conditions, zinc-MT is the predominant form of the metal-binding protein. However, other metals such as copper (Cu) are also bound by MT. Oxidation of the thiolate cluster by a number of mild cellular oxidants causes metal release and formation of MT-disulfide (or thionin if all metals are released from MT, but this is unlikely to occur in vivo), which have been demonstrated in vivo. MT-disulfide can be reduced by glutathione in the presence of selenium catalyst, restoring the capacity of the protein to bind metals like Zn and Cu. This MT redox cycle may play a crucial role in MT biologic function. It may link to the homeostasis of essential metals, detoxification of toxic metals and protection against oxidative stress. In fact, MT has been shown to substitute for superoxide dismutase in yeast cells in the presence of Cu to protect cells and proteins from oxidative stress.

[0228] In one embodiment, said metallothuineins are derived from a eukaryotic organism (e.g., a yeast, fungus, or plant). In another embodiment, said metallothuineins are derived from a prokaryotic organism (e.g., E. coli, Mycobacterium tuberculosis). For example, the metallothionein genes CUP1-1 and CUP1-2 encoding metallothionein CUP1 from S. cerevisiae, active variants thereof, homologs thereof, or combination thereof are expressed in and targeted to the cytosol of yeast to reduce the amount of ROS and increase the activity of DHAD also expressed in and targeted to the yeast cytosol. In another embodiment, S. cerevisiae metallothionein genes CUP1-1 and CUP1-2 are expressed in and targeted to the cytosol of yeast to reduce the amount of ROS and increase the activity of DHAD also expressed in and targeted to the yeast cytosol. In another embodiment, Mycobacterium tuberculosis metallothionein gene MymT encoding metallothionein is expressed in and targeted to the cytosol of yeast to reduce the amount of ROS and increase the activity of DHAD that is also expressed in and targeted to the yeast cytosol. In another embodiment, Synechococcus PCC 7942 metallothionein gene SmtA is expressed in and targeted to the cytosol of yeast to reduce the amount of ROS and increase the activity of DHAD that is also expressed in and targeted to the yeast cytosol. The resulting metallothionein expressing strain has improved isobutanol productivity, titer, and/or yield compared to the parental strain. Metallothioneins from other organisms, such as bacteria, may be identified by sequence homology using tools such as BLAST and pairwise sequence alignments by one skilled in the art.

[0229] In another embodiment, one or more proteins in the thioredoxin system and/or the glutathione/glutaredoxin system, active variants thereof, homologs thereof, or combination thereof are expressed in the yeast cytosol to mitigate oxidative stress. In one embodiment, said proteins in the thioredoxin system and/or the glutathione/glutaredoxin system are derived from a eukaryotic organism (e.g., a yeast, fungus, or plant). In another embodiment, said proteins in the thioredoxin system and/or the glutathione/glutaredoxin system are derived from a prokaryotic organism (e.g., E. coli). The thioredoxin system and the glutathione/glutaredoxin system help maintain the reduced environment of the cell and play significant roles in defending the cell against oxidative stress. Glutathione is the major protective small molecule against oxidative stress in Saccharomyces cerevisiae. Glutathione, the tripeptide γ-glutamyl-cysteinyl-glycine, makes up the major free thiol pool present in millimolar concentrations in aerobic cells. The biosynthesis of glutathione requires γ-glutamyl cysteine synthase (termed Gsh1p) glutathione synthase (Gsh2p) and ATP. Glutathione is essential for viability of yeast but not of bacteria such as E. coli. Yeast cells lacking Gsh1p (genotype gsh1Δ) are able to survive in the presence of an external source of glutathione. Deletion of the GSH1 gene encoding the enzyme that catalyzes the first step of glutathione biosynthesis leads to growth arrest, which can be relieved by either glutathione or reducing agents such as dithiothreitol. Evidence suggests that glutathione, in addition to its protective role against oxidative damage, performs a novel and specific function in the maturation of cytosolic Fe/S proteins. Therefore, increasing the levels of glutathione in the yeast cytosol is predicted to protect or increase the steady-state levels of active FeS cluster containing proteins expressed in the yeast cytosol. Specifically, increasing glutathione within the yeast cytosol may increase the amount of active DHAD enzyme expressed in the yeast cytosol, thereby leading to an increase in the titer, productivity, and/or yield of isobutanol produced from the pathway within which DHAD participates (e.g. the isobutanol pathway in FIGS. 1-2).

[0230] Thioredoxins and glutaredoxins are small heat-stable proteins with redox-active cysteines that facilitate the reduction of other proteins by catalyzing cysteine thiol-disulfide exchange reactions. The glutathione/glutaredoxin system consists of glutaredoxin, glutathione (produced by glutathione synthase), glutathione reductase and NADPH (as an electron donor). Thus, to increase the effective levels of available glutathione, one or a combination of each of the following enzymes is functionally overexpressed in the yeast cytosol: glutaredoxin (encoded in S. cerevisiae by GRX2, GRX4, GRX6, and GRX7), glutathione reductase (encoded in S. cerevisiae by GLR1); and glutathione synthase (encoded in S. cerevisiae by GSH1 and GSH2). In one embodiment, homologs thereof, active variants thereof, or combination thereof can be expressed in the yeast cytosol to mitigate oxidative stress.

[0231] In another embodiment, the γ-glutamyl cysteine synthase and glutathione synthase genes from S. cerevisiae are expressed in and targeted to the cytosol of yeast to increase the amount of glutathione and increase the activity of DHAD also expressed in and targeted to the yeast cytosol. In another embodiment, S. cerevisiae γ-glutamyl cysteine synthase and glutathione synthase genes Gsh1 and Gsh2 are expressed in and targeted to the cytosol of yeast to increase the amount of glutathione and increase the activity of DHAD also expressed in and targeted to the yeast cytosol. The resulting γ-glutamyl cysteine synthase and glutathione synthase expressing strain has improved isobutanol productivity, titer, and/or yield compared to the parental strain. Homologous genes encoding γ-glutamyl cysteine synthase and glutathione synthase from other organisms, such as other yeast strains, may be identified by sequence homology using tools such as BLAST and pairwise sequence alignments by one skilled in the art.

[0232] Thioredoxins contain two conserved cysteines that exist in either a reduced form as in thioredoxin-(SH)₂) or in an oxidized form as in thioredoxin-S₂) when they form an intramolecular disulfide bridge. Thioredoxins donate electrons from their active center dithiol to protein disulfide bonds (Protein-S₂) that are then reduced to dithiols (Protein-(SH)₂). The resulting oxidized thioredoxin disulfide is reduced directly by thioredoxin reductase with electrons donated by NADPH. Hence the thioredoxin reduction system consists of thioredoxin, thioredoxin reductase, and NADPH. Oxidized glutaredoxins, on the other hand, are reduced by the tripeptide glutathione (gamma-Glu-Cys-Gly, known as GSH) using electrons donated by NADPH. Hence the glutathione/glutaredoxin system consists of glutaredoxin, glutathione, glutathione reductase and NADPH.

[0233] S. cerevisiae contains a cytoplasmic thioredoxin system comprised of the thioredoxins Trx1p and Trx2p and the thioredoxin reductase Trr1p, and a complete mitochondrial thioredoxin system comprised of the thioredoxin Trx3p and the thioredoxin reductase Trr2p. Evidence suggests that the cytoplasmic thioredoxin system may have overlapping function with the glutathione/glutaredoxin system. The mitochondrial thioredoxin system, on the other hand, does not appear to be able to substitute for either the cytoplasmic thioredoxin or glutathione/glutaredoxin systems. Instead, the mitochondrial thioredoxin proteins, thioredoxin (Trx3p) and thioredoxin reductase (Trr2p) have been implicated in the defense against oxidative stress generated during respiratory metabolism.

[0234] Overexpression of the essential cytosolic functional components of the thioredoxin system is thus predicted to increase the amount of bioavailable cytosolic thioredoxin, resulting in a significant increase in cellular redox buffering potential and concomitant increase in stable, active cytosolic FeS clusters and DHAD activity. Thus, one or more of the following genes are expressed either singly or in combination, thereby resulting in a functional increase in available thioredoxin: a thioredoxin (encoded in S. cerevisiae by TRX1 and TRX2) and a thioredoxin reductase (encoded in S. cerevisiae by TRR1). Separately, or in combination with the aforementioned genes, the mitochondrial thioredoxin system (encoded by thioredoxin gene TRX3 and thioredoxin reductase gene TRR2) are overexpressed, and, although functional in the mitochondria, provide an added or synergistic effect on FeS cluster assembly or stability, as assayed by increased DHAD activity and/or output of isobutanol in a fermentation. Overexpression of these genes may be accomplished by methods as described above. In one embodiment, active variants of any one of the aforementioned thioredoxins or thioredoxin reductases, homologs thereof, or combination thereof are expressed in the yeast cytosol to mitigate oxidative stress.

### Enhancing Cytosolic DHAD Activity by Mitigating Stress Mediated by Reactive Nitrogen Species (RNS)

[0235] Nitric oxide and reactive nitrogen species are highly reactive, short-lived molecules that can be generated during periods of cellular stress. The exact mechanisms by which these molecules are created, or their downstream targets, is not completely understood and is the subject of intense investigation. However, the functional groups present in many proteins—for example, FeS clusters—are readily attacked and inactivated by NO/RNS. Loss of these labile functional groups usually results in an inactive enzyme.

[0236] Nitric oxide and reactive nitrogen species are highly reactive, short-lived molecules that can be generated during normal cellular function, respiration, and during periods of cellular or redox stress. RNS are produced in eukaryotic cells starting with the reaction of nitric oxide (.NO) with superoxide (O2.-) to form peroxynitrite (ONOO—):

.NO(nitric oxide)+O2.-(super oxide)→ONOO-(peroxynitrite)

[0237] Peroxynitrite itself is a highly reactive species which can directly react with various components of the cell. Alternatively peroxynitrite can react with other molecules to form additional types of RNS including nitrogen dioxide (.NO₂) and dinitrogen trioxide (N₂O₃) as well as other types of chemically reactive radicals. Important reactions involving RNS include:

ONOO-+H+→ONOOH(peroxynitrous acid)→.NO₂(nitrogen dioxide)+.OH(hydroxyl radical)

ONOO-+CO₂(carbon dioxide)→ONOOCO₂-(nitrosoperoxycarbonate)

ONOOCO₂-→.NO₂(nitrogen dioxide)+O═C(O.)O-(carbonate radical)

.NO+.NO₂ is in equilibrium with N₂O₃(dinitrogen trioxide)

[0238] NO exhibits other types of interaction that are candidates for mediating aspects of its physiological action. Notably, in a process known as nitrosylation, or nitrosation, NO can modify free sulfydryl (thiol) groups of cysteines in proteins to produce nitrosothiols, SNOs. Transfer of the NO adduct from one sulfydryl to another transnitrosylation) is likely to play a signal transduction role (reviewed in Stamler et al., 2001). Study of this post-translational modification, which is proposed to be a widespread mediator of signaling, is a relatively new field, and the list of proteins that are modified through nitrosylation is expanding rapidly. Because NO is highly reactive, transport of an NO signal in tissues can be facilitated through reaction with glutathione and movement of the resulting S-nitrosoglutathione (GSNO), which can subsequently signal by modifying thiol groups on target proteins by transnitrosylation (Lipton et al., 2001; Foster et al., 2003). The discovery of GSNO reductase (GSNOR), which reduces GSNO to restore GSH and to eliminate the NO adduct as NH⁴⁺ (Jensen et al., 1998), revealed the importance of the control of this NO metabolite.

[0239] The exact mechanisms by which the aforementioned molecules are generated, or their downstream targets, are not completely understood and are the subject of intense investigation. However, the functional groups present in many proteins—for example, FeS clusters—are readily attacked by NO/RNS. The enzyme dihydroxyacid dehydratase (DHAD) contains an iron-sulfur (FeS) cluster cofactor that is sensitive to damage by NO or RNS. As an example of the biological sensitivity of this class of enzyme to attack by NO/RNS, inactivation of the E. coli DHAD (encoded by ilvD) and subsequent bacterial cell death resulting from macrophage-generated NO is a major component of the mammalian humoral immune response.

[0240] The present invention provides methods of mitigating the potentially harmful effects of oxidative and nitrosative stress (e.g., NO and/or or RNS) on enzymes involved in the production of isobutanol in the yeast cytosol. Specifically, the enzyme dihydroxyacid dehydratase (DHAD) contains an iron-sulfur (Fe—S) cluster that is sensitive to damage by NO and/or RNS, leading to inactive enzyme. Strategies of mitigating such harmful effects include, but are not limited to, increasing repair of iron-sulfur clusters damaged by oxidative and nitrosative stress conditions; reducing nitric oxide levels by introduction of a nitric oxide reductase (NOR) activity in the cell; reducing the levels of SNO's by overexpression of a GSNO-reductase; or combination thereof.

[0241] Strategies disclosed herein are intended to protect or repair DHAD from NO/RNS damage. Accordingly, in one embodiment, the present invention provides recombinant microorganisms that have been engineered to express one or more enzymes in the cytosol that reduce the concentration of reactive nitrogen species (RNS) and/or nitric oxide in said cytosol.

[0242] In one embodiment, the present invention provides recombinant microorganisms that have been engineered to express a nitric oxide reductase that reduce the concentration of reactive nitrogen species (RNS) and/or nitric oxide in said cytosol. To reduce nitric oxide levels in the yeast cytosol, one or more nitric oxide reductases (NORs) or active variants thereof can be introduced into the cell by overexpression. Genes present in several microbial species have been shown to encode a nitric oxide reductase activity. For example, in E. coli the gene for a flavorubredoxin, norV, encodes a flavo-diiron NO reductase that is one of the most highly induced genes when E. coli cells are exposed to NO or GSNO. Previous work has identified a gene present in the microbe Fusarium oxysporum as encoding a cytochrome P-450 55A1 (P-450dNIR) that encodes a nitric oxide reductase (Nakahara et al., 1993, J. Biol. Chem. 268:8350-8355). When expressed in a eukaryotic cell, this gene product appears to be cytosolically localized and exhibits effects consistent with its reducing intracellular NO levels (Dijkers et al., 2009, Molecular Biology of the Cell, 20: 4083-4090). Thus, in one embodiment, homologs of any above-described nitric oxide reductases, active variants thereof, or combinations thereof are expressed in the yeast cytosol to mitigate nitric oxide.

[0243] In contrast to E. coli and F. oxysporum, S. cerevisiae lacks an endogenous NOR activity (and no homologs of either NOR protein is found in the S. cerevisiae genome). Thus, to provide such an activity, the F. oxysporum NOR gene is synthesized or amplified from genomic DNA, or the E. coli norV gene is amplified from genomic DNA, and either (or both) cloned into a suitable yeast expression vector. Such a vector could either be high copy (e.g., 2 micron origin) or low copy (CEN/ARSH), or a single or multiple copies of the gene could be stably integrated into the genome of a host organism, specifically a yeast containing a cytosolic isobutanol pathway. In each case, methods to clone a gene into a plasmid so that it is expressed at a desired level under the control of a known yeast promoter (including those steps required to transform a host yeast cell) are well known to those skilled in the art. In those cases where the NOR gene is expressed from an episomal plasmid, it can be advantageous to simultaneous overexpress a desired DHAD gene, either from the same or from another plasmid, thereby allowing one to assay the resulting output in DHAD activity. Similar approaches are undertaken to express the NOR gene in the presence of a plasmid(s) encoding an isobutanol production pathway, where the results of NOR expression are manifested in changes in isobutanol productivity, titer, or yield. It is understood by one skilled in the art that expression of all genes, both NOR and genes encoding the isobutanol pathway may be integrated into the genome of a host organism in a single or multiple copies of the gene(s), specifically a yeast containing a cytosolic isobutanol pathway.

[0244] In another embodiment, the present invention provides recombinant microorganisms that have been engineered to express a glutathione-S-nitrosothiol reductase (GSNO-reductase) that reduces the concentration of reactive nitrogen species (RNS) and/or nitric oxide in said cytosol. To reduce the levels of SNO's, one or more GSNO-reductases or active variants thereof can be introduced into the cell by overexpression. In S. cerevisiae, the gene SFA1 has been shown to encode a formaldehyde dehydrogenase that possesses GSNO reductase activity (Liu et al., 2001, Nature 410:490-494). Sfa1p is a member of the class III alcohol dehydrogenases (EC:1.1.1.284), which are bifunctional enzymes containing both alcohol dehydrogenase and glutathione-dependent formaldehyde dehydrogenase activities. The glutathione-dependent formaldehyde dehydrogenase activity of Sfa1p is required for the detoxification of formaldehyde, and the alcohol dehydrogenase activity of Sfa1p can catalyze the final reactions in phenylalanine and tryptophan degradation. Sfa1p is also able to act as a hydroxymethylfurfural (HMF) reductase and catabolize HMF, a compound formed in the production of certain biofuels. Sfa1p has been localized to the cytoplasm and the mitochondria, and can act on a variety of substrates, including S-hydroxymethylglutathione, phenylacetaldehyde, indole acetaldehyde, octanol, 10-hydroxydecanoic acid, 12-hydroxydodecanoic acid, and S-nitrosoglutathione.

[0245] Sfa1 protein levels are reported as being low-to-moderate from proteome-wide analyses (Ghaemmaghami et al., 2003, Nature 425(6959):737-41). Thus, in an analogous fashion to the approach described for overexpression of NOR, the gene SFA1 is overexpressed, thereby decoupling it from its normal regulatory control and permitting significant increase in Sfa1 activity in the cell, which results in measureable increases in DHAD activity and/or fermentation output, as described above. Overexpression of these genes may be accomplished by methods as described above. In one embodiment, homologs of SFA1, active variants thereof, or combinations thereof are expressed in the yeast cytosol to mitigate stresses brought on by reactive nitrogen species.

[0246] In additional embodiments, alternative enzymes may be expressed and targeted to the yeast cytosol containing the isobutanol pathway to mitigate the effects of reactive nitrogen species. Specifically, the enzyme YtfE encoded by E. coli ytfE, homologs thereof, active variants thereof, may be expressed, such that they lead to reduction in NO/RNS in the yeast cytosol and/or a concomitant increase in DHAD function. Such an increase is detected by in vitro assay of DHAD activity, and/or by an increase in productivity, titer, or yield of isobutanol produced by isobutanol pathway-containing cells.

[0247] To increase repairment of iron-sulfur clusters, in one embodiment, the gene ytfE from E. coli is expressed in the yeast cytosol which contains a functional isobutanol pathway and DHAD such that DHAD activity and/or isobutanol productivity, titer, or yield are increased from the yeast cells. In E. coli, the gene ytfE has been shown to play an important role in maintaining active Fe—S clusters. A recent report (Justino et al., (2009). Escherichia coli Di-iron YtfE protein is necessary for the repair of stress-damaged Iron-Sulfur Clusters. JBC 282(14): 10352-10359) showed that ΔytfE strains have several phenotypes, including enhanced susceptibility to nitrosative stress and are defective in the activity of several iron-sulfur-containing proteins. For example, the damage of the [4Fe-4S]²⁺ clusters of aconitase B and fumarase A caused by exposure to hydrogen peroxide and nitric oxide stress occurs at higher rates in the absence of ytfE. The ytfE null mutation also abolished the recovery of aconitase and fumarase activities, which is observed in wild-type E. coli once the stress is scavenged. Notably, upon the addition of purified holo-YtfE protein to mutant cell extracts, the enzymatic activities of fumarase and aconitase were fully recovered, and at rates similar to the wild-type strain. Thus, YtfE is critical for the repair of iron-sulfur clusters damaged by oxidative and nitrosative stress conditions, and presents an attractive candidate for overexpression in a host cell that normally lacks this activity, such as S. cerevisiae, where Fe—S cluster proteins are also being overexpressed as part of the isobutanol pathway.

[0248] To provide such an activity, the E. coli ytfE gene can be amplified from genomic DNA by PCR with appropriate primers, and cloned into a suitable yeast expression vector. Such a vector could either be high copy (e.g., 2 micron origin) or low copy (CEN/ARS), or a single or multiple copies of the gene could be stably integrated into the genome of a host organism. In each case, methods to clone a gene into a plasmid so that it is expressed at a desired level under the control of a known yeast promoter (including those steps required to transform a host yeast cell) are well known to those skilled in the art. In those cases where the ytfE gene is expressed from an episomal plasmid, it can be advantageous to simultaneous overexpress a desired DHAD gene, either from the same or from another plasmid, thereby allowing one to assay the resulting output in DHAD activity. Similar approaches are undertaken to express the ytfE gene in the presence of a plasmid(s) encoding an isobutanol production pathway, where the results of ytfE expression are manifested in changes in isobutanol productivity, titer, or yield. More specifically, ytfE is expressed in the yeast cytosol which contains a functional isobutanol pathway and DHAD such that DHAD activity and/or isobutanol productivity, titer, or yield are increased from the yeast cells.

[0249] In addition, functional homologs of E. coli ytfE have been identified and characterized. For example, genes from two pathogenic prokaryotes—scdA from Staphylococcus aureus, and dnrN from Neisseria gonorrhoeae, have been shown to have properties similar to that of ytfE (Overton, T. W., et al (2008). Widespread distribution in pathogenic bacteria of di-iron proteins that repair oxidative and nitrosative damage to iron-sulfur centers. J. Bacteriology 190(6): 2004-2013). Thus, similar approaches to overexpress either of these genes are employed, as described for E. coli ytfE, above. Overexpression of these genes may be accomplished by methods as described above.

### The Microorganism in General

[0250] The recombinant microorganisms provided herein can express a plurality of heterologous and/or native target enzymes involved in pathways for the production of beneficial metabolites such as isobutanol, 3-methyl-1-butanol, 2-methyl-1-butanol, valine, isoleucine, leucine, and pantothenic acid from a suitable carbon source.

[0251] Accordingly, “engineered” or “modified” microorganisms are produced via the introduction of genetic material into a host or parental microorganism of choice and/or by modification of the expression of native genes, thereby modifying or altering the cellular physiology and biochemistry of the microorganism. Through the introduction of genetic material and/or the modification of the expression of native genes the parental microorganism acquires new properties, e.g. the ability to produce a new, or greater quantities of, an intracellular metabolite. As described herein, the introduction of genetic material into and/or the modification of the expression of native genes in a parental microorganism results in a new or modified ability to produce beneficial metabolites such as isobutanol, 3-methyl-1-butanol, 2-methyl-1-butanol, valine, isoleucine, leucine, and pantothenic acid from a suitable carbon source. The genetic material introduced into and/or the genes modified for expression in the parental microorganism contains gene(s), or parts of genes, coding for one or more of the enzymes involved in a biosynthetic pathway for the production of one or more metabolites selected from isobutanol, 3-methyl-1-butanol, 2-methyl-1-butanol, valine, isoleucine, leucine, and pantothenic acid and may also include additional elements for the expression and/or regulation of expression of these genes, e.g. promoter sequences.

[0252] In addition to the introduction of a genetic material into a host or parental microorganism, an engineered or modified microorganism can also include alteration, disruption, deletion or knocking-out of a gene or polynucleotide to alter the cellular physiology and biochemistry of the microorganism. Through the alteration, disruption, deletion or knocking-out of a gene or polynucleotide the microorganism acquires new or improved properties (e.g., the ability to produce a new metabolite or greater quantities of an intracellular metabolite, improve the flux of a metabolite down a desired pathway, and/or reduce the production of byproducts).

[0253] Recombinant microorganisms provided herein may also produce metabolites in quantities not available in the parental microorganism. A “metabolite” refers to any substance produced by metabolism or a substance necessary for or taking part in a particular metabolic process. A metabolite can be an organic compound that is a starting material (e.g., glucose or pyruvate), an intermediate (e.g., 2-ketoisovalerate), or an end product (e.g., isobutanol) of metabolism. Metabolites can be used to construct more complex molecules, or they can be broken down into simpler ones. Intermediate metabolites may be synthesized from other metabolites, perhaps used to make more complex substances, or broken down into simpler compounds, often with the release of chemical energy.

[0254] The disclosure identifies specific genes useful in the methods, compositions and organisms of the disclosure; however it will be recognized that absolute identity to such genes is not necessary. For example, changes in a particular gene or polynucleotide comprising a sequence encoding a polypeptide or enzyme can be performed and screened for activity. Typically such changes comprise conservative mutations and silent mutations. Such modified or mutated polynucleotides and polypeptides can be screened for expression of a functional enzyme using methods known in the art.

[0255] Due to the inherent degeneracy of the genetic code, other polynucleotides which encode substantially the same or functionally equivalent polypeptides can also be used to clone and express the polynucleotides encoding such enzymes.

[0256] As will be understood by those of skill in the art, it can be advantageous to modify a coding sequence to enhance its expression in a particular host. The genetic code is redundant with 64 possible codons, but most organisms typically use a subset of these codons. The codons that are utilized most often in a species are called optimal codons, and those not utilized very often are classified as rare or low-usage codons. Codons can be substituted to reflect the preferred codon usage of the host, a process sometimes called “codon optimization” or “controlling for species codon bias.”

[0257] Optimized coding sequences containing codons preferred by a particular prokaryotic or eukaryotic host (Murray et al., 1989, Nucl Acids Res. 17: 477-508) can be prepared, for example, to increase the rate of translation or to produce recombinant RNA transcripts having desirable properties, such as a longer half-life, as compared with transcripts produced from a non-optimized sequence. Translation stop codons can also be modified to reflect host preference. For example, typical stop codons for S. cerevisiae and mammals are UAA and UGA, respectively. The typical stop codon for monocotyledonous plants is UGA, whereas insects and E. coli commonly use UAA as the stop codon (Dalphin et al., 1996, Nucl Acids Res. 24: 216-8). Methodology for optimizing a nucleotide sequence for expression in a plant is provided, for example, in U.S. Pat. No. 6,015,891, and the references cited therein.

[0258] Those of skill in the art will recognize that, due to the degenerate nature of the genetic code, a variety of DNA compounds differing in their nucleotide sequences can be used to encode a given enzyme of the disclosure. The native DNA sequence encoding the biosynthetic enzymes described above are referenced herein merely to illustrate an embodiment of the disclosure, and the disclosure includes DNA compounds of any sequence that encode the amino acid sequences of the polypeptides and proteins of the enzymes utilized in the methods of the disclosure. In similar fashion, a polypeptide can typically tolerate one or more amino acid substitutions, deletions, and insertions in its amino acid sequence without loss or significant loss of a desired activity. The disclosure includes such polypeptides with different amino acid sequences than the specific proteins described herein so long as they modified or variant polypeptides have the enzymatic anabolic or catabolic activity of the reference polypeptide. Furthermore, the amino acid sequences encoded by the DNA sequences shown herein merely illustrate embodiments of the disclosure.

[0259] In addition, homologs of enzymes useful for generating metabolites are encompassed by the microorganisms and methods provided herein.

[0260] As used herein, two proteins (or a region of the proteins) are substantially homologous when the amino acid sequences have at least about 30%, 40%, 50% 60%, 65%, 70%, 75%, 80%, 85%, 90%, 91%, 92%, 93%, 94%, 95%, 96%, 97%, 98%, or 99% identity. To determine the percent identity of two amino acid sequences, or of two nucleic acid sequences, the sequences are aligned for optimal comparison purposes (e.g., gaps can be introduced in one or both of a first and a second amino acid or nucleic acid sequence for optimal alignment and non-homologous sequences can be disregarded for comparison purposes). In one embodiment, the length of a reference sequence aligned for comparison purposes is at least 30%, typically at least 40%, more typically at least 50%, even more typically at least 60%, and even more typically at least 70%, 80%, 90%, 100% of the length of the reference sequence. The amino acid residues or nucleotides at corresponding amino acid positions or nucleotide positions are then compared. When a position in the first sequence is occupied by the same amino acid residue or nucleotide as the corresponding position in the second sequence, then the molecules are identical at that position (as used herein amino acid or nucleic acid “identity” is equivalent to amino acid or nucleic acid “homology”). The percent identity between the two sequences is a function of the number of identical positions shared by the sequences, taking into account the number of gaps, and the length of each gap, which need to be introduced for optimal alignment of the two sequences.

[0261] When “homologous” is used in reference to proteins or peptides, it is recognized that residue positions that are not identical often differ by conservative amino acid substitutions. A “conservative amino acid substitution” is one in which an amino acid residue is substituted by another amino acid residue having a side chain (R group) with similar chemical properties (e.g., charge or hydrophobicity). In general, a conservative amino acid substitution will not substantially change the functional properties of a protein. In cases where two or more amino acid sequences differ from each other by conservative substitutions, the percent sequence identity or degree of homology may be adjusted upwards to correct for the conservative nature of the substitution. Means for making this adjustment are well known to those of skill in the art (See, e.g., Pearson W. R., 1994, Methods in Mol Biol 25: 365-89.

[0262] The following six groups each contain amino acids that are conservative substitutions for one another: 1) Serine (S), Threonine (T); 2) Aspartic Acid (D), Glutamic Acid (E); 3) Asparagine (N), Glutamine (Q); 4) Arginine (R), Lysine (K); 5) Isoleucine (I), Leucine (L), Alanine (A), Valine (V), and 6) Phenylalanine (F), Tyrosine (Y), Tryptophan (W).

[0263] Sequence homology for polypeptides, which is also referred to as percent sequence identity, is typically measured using sequence analysis software. See commonly owned and co-pending application US 2009/0226991. A typical algorithm used comparing a molecule sequence to a database containing a large number of sequences from different organisms is the computer program BLAST. When searching a database containing sequences from a large number of different organisms, it is typical to compare amino acid sequences. Database searching using amino acid sequences can be measured by algorithms described in commonly owned and co-pending application US 2009/0226991.

[0264] It is understood that a range of microorganisms can be modified to include a recombinant metabolic pathway suitable for the production of beneficial metabolites from DHAD-requiring biosynthetic pathways. In various embodiments, microorganisms may be selected from yeast microorganisms. Yeast microorganisms for the production of a metabolite such as isobutanol, 3-methyl-1-butanol, 2-methyl-1-butanol, valine, isoleucine, leucine, and pantothenic acid may be selected based on certain characteristics:

[0265] One characteristic may include the property that the microorganism is selected to convert various carbon sources into beneficial metabolites such as isobutanol, 3-methyl-1-butanol, 2-methyl-1-butanol, valine, isoleucine, leucine, and pantothenic acid. The term “carbon source” generally refers to a substance suitable to be used as a source of carbon for prokaryotic or eukaryotic cell growth. Examples of suitable carbon sources are described in commonly owned and co-pending application US 2009/0226991. Accordingly, in one embodiment, the recombinant microorganism herein disclosed can convert a variety of carbon sources to products, including but not limited to glucose, galactose, mannose, xylose, arabinose, lactose, sucrose, and mixtures thereof.

[0266] The recombinant microorganism may thus further include a pathway for the production of isobutanol, 3-methyl-1-butanol, 2-methyl-1-butanol, valine, isoleucine, leucine, and/or pantothenic acid from five-carbon (pentose) sugars including xylose. Most yeast species metabolize xylose via a complex route, in which xylose is first reduced to xylitol via a xylose reductase (XR) enzyme. The xylitol is then oxidized to xylulose via a xylitol dehydrogenase (XDH) enzyme. The xylulose is then phosphorylated via a xylulokinase (XK) enzyme. This pathway operates inefficiently in yeast species because it introduces a redox imbalance in the cell. The xylose-to-xylitol step uses primarily NADPH as a cofactor (generating NADP+), whereas the xylitol-to-xylulose step uses NAD+ as a cofactor (generating NADH). Other processes must operate to restore the redox imbalance within the cell. This often means that the organism cannot grow anaerobically on xylose or other pentose sugars. Accordingly, a yeast species that can efficiently ferment xylose and other pentose sugars into a desired fermentation product is therefore very desirable.

[0267] Thus, in one aspect, the recombinant microorganism is engineered to express a functional exogenous xylose isomerase. Exogenous xylose isomerases (XI) functional in yeast are known in the art. See, e.g., Rajgarhia et al., US2006/0234364, which is herein incorporated by reference in its entirety. In an embodiment according to this aspect, the exogenous XI gene is operatively linked to promoter and terminator sequences that are functional in the yeast cell. In a preferred embodiment, the recombinant microorganism further has a deletion or disruption of a native gene that encodes for an enzyme (e.g., XR and/or XDH) that catalyzes the conversion of xylose to xylitol. In a further preferred embodiment, the recombinant microorganism also contains a functional, exogenous xylulokinase (XK) gene operatively linked to promoter and terminator sequences that are functional in the yeast cell. In one embodiment, the xylulokinase (XK) gene is overexpressed.

[0268] In one embodiment, the microorganism has reduced or no pyruvate decarboxylase (PDC) activity. PDC catalyzes the decarboxylation of pyruvate to acetaldehyde, which is then reduced to ethanol by ADH via an oxidation of NADH to NADH+. Ethanol production is the main pathway to oxidize the NADH from glycolysis. Deletion of this pathway increases the pyruvate and the reducing equivalents (NADH) available for the DHAD-requiring biosynthetic pathway. Accordingly, deletion of PDC genes can further increase the yield of desired metabolites.

[0269] In another embodiment, the microorganism has reduced or no glycerol-3-phosphate dehydrogenase (GPD) activity. GPD catalyzes the reduction of dihydroxyacetone phosphate (DHAP) to glycerol-3-phosphate (G3P) via the oxidation of NADH to NAD+. Glycerol is then produced from G3P by Glycerol-3-phosphatase (GPP). Glycerol production is a secondary pathway to oxidize excess NADH from glycolysis. Reduction or elimination of this pathway would increase the pyruvate and reducing equivalents (NADH) available for the DHAD-requiring biosynthetic pathway. Thus, deletion of GPD genes can further increase the yield of desired metabolites.

[0270] In yet another embodiment, the microorganism has reduced or no PDC activity and reduced or no GPD activity. PDC-minus, GPD-minus yeast production strains are described in commonly owned and co-pending publications, US 2009/0226991 and US 2011/0020889, both of which are herein incorporated by reference in their entireties for all purposes.

[0271] In yet another embodiment, the microorganism has reduced or no 3-keto acid reductase (3-KAR) activity. 3-keto acid reductase catalyzes the conversion of 3-keto acids (e.g., acetolactate) to 3-hydroxyacids (e.g., DH2MB). 3-KAR-minus yeast production strains are described in commonly owned and co-pending U.S. Application Serial No. 2011/0201090, which is herein incorporated by reference in its entirety for all purposes.

[0272] In yet another embodiment, the microorganism has reduced or no aldehyde dehydrogenase (ALDH) activity. Aldehyde dehydrogenases catalyze the conversion of aldehydes (e.g., isobutyraldehyde) to acid by-products (e.g., isobutyrate). ALDH-minus yeast production strains are described in commonly owned and co-pending U.S. Application Serial No. 2011/0201090, which is herein incorporated by reference in its entirety for all purposes.

[0273] In one embodiment, the yeast microorganisms may be selected from the “Saccharomyces Yeast Clade”, as described in commonly owned and co-pending application US 2009/0226991.

[0274] The term “Saccharomyces sensu stricto” taxonomy group is a cluster of yeast species that are highly related to S. cerevisiae (Rainieri et al., 2003, J. Biosci Bioengin 96: 1-9). Saccharomyces sensu stricto yeast species include but are not limited to S. cerevisiae, S. cerevisiae, S. kudriavzevii, S. mikatae, S. bayanus, S. uvarum, S. carocanis and hybrids derived from these species (Masneuf et al., 1998, Yeast 7: 61-72).

[0275] An ancient whole genome duplication (WGD) event occurred during the evolution of the hemiascomycete yeast and was discovered using comparative genomic tools (Kellis et al., 2004, Nature 428: 617-24; Dujon et al., 2004, Nature 430:35-44; Langkjaer et al., 2003, Nature 428: 848-52; Wolfe et al., 1997, Nature 387: 708-13). Using this major evolutionary event, yeast can be divided into species that diverged from a common ancestor following the WGD event (termed “post-WGD yeast” herein) and species that diverged from the yeast lineage prior to the WGD event (termed “pre-WGD yeast” herein).

[0276] Accordingly, in one embodiment, the yeast microorganism may be selected from a post-WGD yeast genus, including but not limited to Saccharomyces and Candida. The favored post-WGD yeast species include: S. cerevisiae, S. uvarum, S. bayanus, S. paradoxus, S. castelli, and C. glabrata.

[0277] In another embodiment, the yeast microorganism may be selected from a pre-whole genome duplication (pre-WGD) yeast genus including but not limited to Saccharomyces, Kluyveromyces, Candida, Pichia, Issatchenkia, Debaryomyces, Hansenula, Yarrowia and, Schizosaccharomyces. Representative pre-WGD yeast species include: S. kluyveri, K. thermotolerans, K. marxianus, K. waltii, K. lactis, C. tropicalis, P. pastoris, P. anomala, P. stipitis, I. orientalis, I. occidentalis, I. scutulata, D. hansenii, H. anomala, Y. lipolytica, and S. pombe.

[0278] A yeast microorganism may be either Crabtree-negative or Crabtree-positive as described in described in commonly owned and co-pending application US 2009/0226991. In one embodiment the yeast microorganism may be selected from yeast with a Crabtree-negative phenotype including but not limited to the following genera: Kluyveromyces, Pichia, Issatchenkia, Hansenula, and Candida. Crabtree-negative species include but are not limited to: K. lactis, K. marxianus, P. anomala, P. stipitis, I. orientalis, I. occidentalis, I. scutulata, H. anomala, and C. utilis. In another embodiment, the yeast microorganism may be selected from a yeast with a Crabtree-positive phenotype, including but not limited to Saccharomyces, Kluyveromyces, Zygosaccharomyces, Debaryomyces, Pichia and Schizosaccharomyces. Crabtree-positive yeast species include but are not limited to: S. cerevisiae, S. uvarum, S. bayanus, S. paradoxus, S. eastern, S. kluyveri, K. thermotolerans, C. glabrata, Z. bailli, Z. rouxii, D. hansenii, P. pastorius, and S. pombe.

[0279] Another characteristic may include the property that the microorganism is that it is non-fermenting. In other words, it cannot metabolize a carbon source anaerobically while the yeast is able to metabolize a carbon source in the presence of oxygen. Nonfermenting yeast refers to both naturally occurring yeasts as well as genetically modified yeast. During anaerobic fermentation with fermentative yeast, the main pathway to oxidize the NADH from glycolysis is through the production of ethanol. Ethanol is produced by alcohol dehydrogenase (ADH) via the reduction of acetaldehyde, which is generated from pyruvate by pyruvate decarboxylase (PDC).

[0280] In one embodiment, a fermentative yeast can be engineered to be non-fermentative by the reduction or elimination of the native PDC activity. Thus, most of the pyruvate produced by glycolysis is not consumed by PDC and is available for the isobutanol pathway. Deletion of this pathway increases the pyruvate and the reducing equivalents available for the biosynthetic pathway. Fermentative pathways contribute to low yield and low productivity of desired metabolites such as isobutanol. Accordingly, deletion of PDC genes may increase yield and productivity of desired metabolites such as isobutanol, 3-methyl-1-butanol, 2-methyl-1-butanol, valine, isoleucine, leucine, and pantothenic acid.

[0281] In some embodiments, the recombinant microorganisms may be microorganisms that are non-fermenting yeast microorganisms, including, but not limited to those, classified into a genera selected from the group consisting of Tricosporon, Rhodotorula, Myxozyma, or Candida. In a specific embodiment, the non-fermenting yeast is C. xestobii.

### Isobutanol-Producing Yeast Microorganisms

[0282] Yeast cells convert sugars to produce pyruvate, which is then utilized in a number of pathways of cellular metabolism. In recent years, yeast cells have been engineered to produce a number of desirable products via pyruvate-driven biosynthetic pathways, including isobutanol, an important commodity chemical and biofuel candidate (See, e.g., commonly owned and co-pending patent publications, US 2009/0226991, US 2010/0143997, US 2011/0020889, US 2011/0076733, and WO 2010/075504).

[0283] As described herein, the present application relates to recombinant microorganisms for producing isobutanol, wherein said recombinant microorganisms comprise an isobutanol producing metabolic pathway. In one embodiment, the isobutanol producing metabolic pathway to convert pyruvate to isobutanol can be comprised of the following reactions:

[0284] 2 pyruvate→acetolactate+CO₂

[0285] acetolactate+NAD(P)H→2,3-dihydroxyisovalerate+NAD(P)⁺

[0286] 2,3-dihydroxyisovalerate→alpha-ketoisovalerate

[0287] alpha-ketoisovalerate→isobutyraldehyde+CO₂

[0288] isobutyraldehyde+NAD(P)H→isobutanol+NADP.

[0289] In one embodiment, these reactions are carried out by the enzymes 1) Acetolactate synthase (ALS), 2) Ketol-acid reductoisomerase (KARI), 3) Dihydroxy-acid dehydratase (DHAD), 4) 2-keto-acid decarboxylase, e.g., Keto-isovalerate decarboxylase (KIVD), and 5) an Alcohol dehydrogenase (ADH) (FIG. 1). In some embodiments, the recombinant microorganism may be engineered to overexpress one or more of these enzymes. In an exemplary embodiment, the recombinant microorganism is engineered to overexpress all of these enzymes.

[0290] Alternative pathways for the production of isobutanol in yeast have been described in WO/2007/050671 and in Dickinson et al., 1998, J Biol Chem 273:25751-6. These and other isobutanol producing metabolic pathways are within the scope of the present application. In one embodiment, the isobutanol producing metabolic pathway comprises five substrate to product reactions. In another embodiment, the isobutanol producing metabolic pathway comprises six substrate to product reactions. In yet another embodiment, the isobutanol producing metabolic pathway comprises seven substrate to product reactions.

[0291] In various embodiments described herein, the recombinant microorganism comprises an isobutanol producing metabolic pathway. In one embodiment, the isobutanol producing metabolic pathway comprises at least one exogenous gene encoding a polypeptide that catalyzes a step in the conversion of pyruvate to isobutanol. In another embodiment, the isobutanol producing metabolic pathway comprises at least two exogenous genes encoding polypeptides that catalyze steps in the conversion of pyruvate to isobutanol. In yet another embodiment, the isobutanol producing metabolic pathway comprises at least three exogenous genes encoding polypeptides that catalyze steps in the conversion of pyruvate to isobutanol. In yet another embodiment, the isobutanol producing metabolic pathway comprises at least four exogenous genes encoding polypeptides that catalyze steps in the conversion of pyruvate to isobutanol. In yet another embodiment, the isobutanol producing metabolic pathway comprises at least five exogenous genes encoding polypeptides that catalyze steps in the conversion of pyruvate to isobutanol. In yet another embodiment, all of the isobutanol producing metabolic pathway steps in the conversion of pyruvate to isobutanol are converted by exogenously encoded enzymes.

[0292] In one embodiment, one or more of the isobutanol pathway genes encodes an enzyme that is localized to the cytosol. In one embodiment, the recombinant microorganisms comprise an isobutanol producing metabolic pathway with at least one isobutanol pathway enzyme localized in the cytosol. In another embodiment, the recombinant microorganisms comprise an isobutanol producing metabolic pathway with at least two isobutanol pathway enzymes localized in the cytosol. In yet another embodiment, the recombinant microorganisms comprise an isobutanol producing metabolic pathway with at least three isobutanol pathway enzymes localized in the cytosol. In yet another embodiment, the recombinant microorganisms comprise an isobutanol producing metabolic pathway with at least four isobutanol pathway enzymes localized in the cytosol. In an exemplary embodiment, the recombinant microorganisms comprise an isobutanol producing metabolic pathway with five isobutanol pathway enzymes localized in the cytosol. In yet another exemplary embodiment, the recombinant microorganisms comprise an isobutanol producing metabolic pathway with all isobutanol pathway enzymes localized in the cytosol. Isobutanol producing metabolic pathways in which one or more genes are localized to the cytosol are described in commonly owned and co-pending publication, US 2011/0076733, which is herein incorporated by reference in its entirety for all purposes.

[0293] As is understood in the art, a variety of organisms can serve as sources for the isobutanol pathway enzymes, including, but not limited to, Saccharomyces spp., including S. cerevisiae and S. uvarum, Kluyveromyces spp., including K. thermotolerans, K. lactis, and K. marxianus, Pichia spp., Hansenula spp., including H. polymorpha, Candida spp., Trichosporon spp., Yamadazyma spp., including Y. spp. stipitis, Torulaspora pretoriensis, Issatchenkia orientalis, Schizosaccharomyces spp., including S. pombe, Cryptococcus spp., Aspergillus spp., Neurospora spp., or Ustilago spp. Sources of genes from anaerobic fungi include, but not limited to, Piromyces spp., Orpinomyces spp., or Neocallimastix spp. Sources of prokaryotic enzymes that are useful include, but not limited to, Escherichia spp., Zymomonas spp., Staphylococcus spp., Bacillus spp., Clostridium spp., Corynebacterium spp., Pseudomonas spp., Slackia spp., Lactococcus spp., Enterobacter spp., Streptococcus spp., Salmonella spp., Bacteroides spp., Methanococcus spp., Erythrobacter spp., Sphingomonas spp., Sphingobium spp., and Novosphingobium spp.

[0294] In some embodiments, one or more of these enzymes can be encoded by native genes. Alternatively, one or more of these enzymes can be encoded by heterologous genes. For example, ALS can be encoded by the alsS gene of B. subtilis, alsS of L. lactis, or the ilvK gene of K. pneumonia. For example, KIVD can be encoded by the kivD or kdcA gene of L. lactis. For example, ADH can be encoded by ADH2, ADH6, or ADH7 of S. cerevisiae or the adhA gene of L. lactis.

[0295] In an exemplary embodiment, pathway steps 2 and 5 of the isobutanol pathway may be carried out by KARI and ADH enzymes that utilize NADH (rather than NADPH) as a cofactor. The present inventors have found that utilization of NADH-dependent KARI (NKR) and ADH enzymes to catalyze pathway steps 2 and 5, respectively, surprisingly enables production of isobutanol at theoretical yield and/or under anaerobic conditions. An example of an NADH-dependent isobutanol pathway is illustrated in FIG. 2. Thus, in one embodiment, the recombinant microorganisms of the present application may use an NKR to catalyze the conversion of acetolactate to produce 2,3-dihydroxyisovalerate. In another embodiment, the recombinant microorganisms of the present application may use an NADH-dependent ADH to catalyze the conversion of isobutyraldehyde to produce isobutanol. In yet another embodiment, the recombinant microorganisms of the present application may use both an NKR to catalyze the conversion of acetolactate to produce 2,3-dihydroxyisovalerate, and an NADH-dependent ADH to catalyze the conversion of isobutyraldehyde to produce isobutanol.

[0296] In another embodiment, the yeast microorganism may be engineered to have increased ability to convert pyruvate to isobutanol. In one embodiment, the yeast microorganism may be engineered to have increased ability to convert pyruvate to isobutyraldehyde. In another embodiment, the yeast microorganism may be engineered to have increased ability to convert pyruvate to keto-isovalerate. In another embodiment, the yeast microorganism may be engineered to have increased ability to convert pyruvate to 2,3-dihydroxyisovalerate. In another embodiment, the yeast microorganism may be engineered to have increased ability to convert pyruvate to acetolactate.

[0297] Furthermore, any of the genes encoding the foregoing enzymes (or any others mentioned herein (or any of the regulatory elements that control or modulate expression thereof)) may be optimized by genetic/protein engineering techniques, such as directed evolution or rational mutagenesis, which are known to those of ordinary skill in the art. Such action allows those of ordinary skill in the art to optimize the enzymes for expression and activity in yeast and other microorganisms, e.g., bacterial microorganisms.

### Methods in General

### Identification of an Nfs1 or Isd11 Protein in a Microorganism

[0298] Any method can be used to identify genes that encode for proteins with Nfs1 and/or Isd11 activity. Generally, genes that are homologous or similar to a known NFS1 or ISD11 gene, e.g., S. cerevisiae NFS1 (encoding for Nfs1) or S. cerevisiae ISD11 (encoding for Isd11) can be identified by functional, structural, and/or genetic analysis. In most cases, homologous or similar NFS1 genes and/or homologous or similar Nfs1 proteins will have functional, structural, or genetic similarities. Likewise, homologous or similar ISD11 genes and/or homologous or similar Isd11 proteins will have functional, structural, or genetic similarities. A representative listing of Nfs1 proteins may be found in SEQ ID NOs: 227, 229, 231, 233, 235, 237, 239, 241, 243, 245, 247, and 249, encoded by SEQ ID NOs: 226, 228, 230, 232, 234, 236, 238, 240, 242, 244, 246, and 248, respectively. Likewise, a representative listing of Isd11 proteins may found in SEQ ID NOs: 251, 253, 255, 257, 259, 261, 263, 265, 267, 269, 271, and 273, encoded by SEQ ID NOs: 250, 252, 254, 256, 258, 260, 262, 264, 266, 268, 270, and 272, respectively.

[0299] Techniques known to those skilled in the art may be suitable to identify homologous genes and homologous enzymes. Generally, analogous genes and/or analogous enzymes can be identified by functional analysis and will have functional similarities. Techniques known to those skilled in the art may be suitable to identify analogous genes and analogous enzymes. For example, to identify homologous or analogous genes, or proteins, techniques may include, but are not limited to, cloning a NFS1 and/or ISD11 gene by PCR using primers based on a published sequence of a gene/protein or by degenerate PCR using degenerate primers designed to amplify a conserved region among NFS1 and/or ISD11 genes. Further, one skilled in the art can use techniques to identify homologous or analogous genes, or proteins, with functional homology or similarity. For instance, the computer program BLAST may be used for such a purpose. To identify homologous or similar genes and/or homologous or similar proteins, analogous genes and/or analogous proteins, techniques also include comparison of data concerning a candidate gene or protein with databases such as BRENDA, KEGG, the Saccharomyces Genome Database, or MetaCYC. The candidate gene or protein may be identified within the above mentioned databases in accordance with the teachings herein.

### Identification of an Aft Protein in a Microorganism

[0300] Any method can be used to identify genes that encode for proteins with Aft activity. Aft1 and Aft2 enhance cellular iron availability. Generally, genes that are homologous or similar to a known AFT gene, e.g. S. cerevisiae AFT1 (encoding for SEQ ID NO: 2) or S. cerevisiae AFT2 (encoding for SEQ ID NO: 4) can be identified by functional, structural, and/or genetic analysis. In most cases, homologous or similar AFT genes and/or homologous or similar Aft proteins will have functional, structural, or genetic similarities. Techniques known to those skilled in the art may be suitable to identify homologous genes and homologous enzymes. Generally, analogous genes and/or analogous enzymes can be identified by functional analysis and will have functional similarities. Techniques known to those skilled in the art may be suitable to identify analogous genes and analogous enzymes. For example, to identify homologous or analogous genes, proteins, or enzymes, techniques may include, but not limited to, cloning a AFT gene by PCR using primers based on a published sequence of a gene/enzyme or by degenerate PCR using degenerate primers designed to amplify a conserved region among AFT genes. Further, one skilled in the art can use techniques to identify homologous or analogous genes, proteins, or enzymes with functional homology or similarity. For instance, the computer program BLAST may be used for such a purpose. To identify homologous or similar genes and/or homologous or similar proteins, analogous genes and/or analogous proteins, techniques also include comparison of data concerning a candidate gene or enzyme with databases such as BRENDA, KEGG, or MetaCYC. The candidate gene or enzyme may be identified within the above mentioned databases in accordance with the teachings herein.

### Genetic Insertions and Deletions

[0301] Any method can be used to introduce a nucleic acid molecule into yeast and many such methods are well known. For example, transformation and electroporation are common methods for introducing nucleic acid into yeast cells. See, e.g., Gietz et al., 1992, Nuc Acids Res. 27: 69-74; Ito et al., 1983, J. Bacteriol. 153: 163-8; and Becker et al., 1991, Methods in Enzymology 194: 182-7.

[0302] In an embodiment, the integration of a gene of interest into a DNA fragment or target gene of a yeast microorganism occurs according to the principle of homologous recombination. According to this embodiment, an integration cassette containing a module comprising at least one yeast marker gene and/or the gene to be integrated (internal module) is flanked on either side by DNA fragments homologous to those of the ends of the targeted integration site (recombinogenic sequences). After transforming the yeast with the cassette by appropriate methods, a homologous recombination between the recombinogenic sequences may result in the internal module replacing the chromosomal region in between the two sites of the genome corresponding to the recombinogenic sequences of the integration cassette. (Orr-Weaver et al., 1981, PNAS USA 78: 6354-58).

[0303] In an embodiment, the integration cassette for integration of a gene of interest into a yeast microorganism includes the heterologous gene under the control of an appropriate promoter and terminator together with the selectable marker flanked by recombinogenic sequences for integration of a heterologous gene into the yeast chromosome. In an embodiment, the heterologous gene includes an appropriate native gene desired to increase the copy number of a native gene(s). The selectable marker gene can be any marker gene used in yeast, including but not limited to, HIS3, TRP1, LEU2, URA3, bar, ble, hph, and kan. The recombinogenic sequences can be chosen at will, depending on the desired integration site suitable for the desired application.

[0304] In another embodiment, integration of a gene into the chromosome of the yeast microorganism may occur via random integration (Kooistra et al., 2004, Yeast 21: 781-792).

[0305] Additionally, in an embodiment, certain introduced marker genes are removed from the genome using techniques well known to those skilled in the art. For example, URA3 marker loss can be obtained by plating URA3 containing cells in FOA (5-fluoro-orotic acid) containing medium and selecting for FOA resistant colonies (Boeke et al., 1984, Mol. Gen. Genet. 197: 345-47).

[0306] The exogenous nucleic acid molecule contained within a yeast cell of the disclosure can be maintained within that cell in any form. For example, exogenous nucleic acid molecules can be integrated into the genome of the cell or maintained in an episomal state that can stably be passed on (“inherited”) to daughter cells. Such extra-chromosomal genetic elements (such as plasmids, mitochondrial genome, etc.) can additionally contain selection markers that ensure the presence of such genetic elements in daughter cells. Moreover, the yeast cells can be stably or transiently transformed. In addition, the yeast cells described herein can contain a single copy, or multiple copies of a particular exogenous nucleic acid molecule as described above.

### Reduction of Enzymatic Activity

[0307] Yeast microorganisms within the scope of the invention may have reduced enzymatic activity such as reduced 3-KAR, ALDH, PDC, or GPD activity. The term “reduced” as used herein with respect to a particular enzymatic activity refers to a lower level of enzymatic activity than that measured in a comparable yeast cell of the same species. The term reduced also refers to the elimination of enzymatic activity as compared to a comparable yeast cell of the same species. Thus, yeast cells lacking 3-KAR, ALDH, PDC, or GPD activity are considered to have reduced 3-KAR, ALDH, PDC, or GPD activity since most, if not all, comparable yeast strains have at least some 3-KAR, ALDH, PDC, or GPD activity. Such reduced enzymatic activities can be the result of lower enzyme concentration, lower specific activity of an enzyme, or a combination thereof. Many different methods can be used to make yeast having reduced enzymatic activity. For example, a yeast cell can be engineered to have a disrupted enzyme-encoding locus using common mutagenesis or knock-out technology. See, e.g., Methods in Yeast Genetics (1997 edition), Adams, Gottschling, Kaiser, and Stems, Cold Spring Harbor Press (1998). In addition, certain point-mutation(s) can be introduced which results in an enzyme with reduced activity. Also included within the scope of this invention are yeast strains which when found in nature, are substantially free of one or more activities selected from 3-KAR, ALDH, PDC, or GPD activity.

[0308] Alternatively, antisense technology can be used to reduce enzymatic activity. For example, yeast can be engineered to contain a cDNA that encodes an antisense molecule that prevents an enzyme from being made. The term “antisense molecule” as used herein encompasses any nucleic acid molecule that contains sequences that correspond to the coding strand of an endogenous polypeptide. An antisense molecule also can have flanking sequences (e.g., regulatory sequences). Thus antisense molecules can be ribozymes or antisense oligonucleotides. A ribozyme can have any general structure including, without limitation, hairpin, hammerhead, or axhead structures, provided the molecule cleaves RNA.

[0309] Yeasts having a reduced enzymatic activity can be identified using many methods. For example, yeasts having reduced 3-KAR, ALDH, PDC, or GPD activity can be easily identified using common methods, which may include, for example, measuring for the formation of the by-products produced by such enzymes via liquid chromatography.

### Overexpression of Heterologous Genes

[0310] Methods for overexpressing a polypeptide from a native or heterologous nucleic acid molecule are well known. Such methods include, without limitation, constructing a nucleic acid sequence such that a regulatory element promotes the expression of a nucleic acid sequence that encodes the desired polypeptide. Typically, regulatory elements are DNA sequences that regulate the expression of other DNA sequences at the level of transcription. Thus, regulatory elements include, without limitation, promoters, enhancers, and the like. For example, the exogenous genes can be under the control of an inducible promoter or a constitutive promoter. Moreover, methods for expressing a polypeptide from an exogenous nucleic acid molecule in yeast are well known. For example, nucleic acid constructs that are used for the expression of exogenous polypeptides within Kluyveromyces and Saccharomyces are well known (see, e.g., U.S. Pat. Nos. 4,859,596 and 4,943,529, for Kluyveromyces and, e.g., Gellissen et al., Gene 190(1):87-97 (1997) for Saccharomyces). Yeast plasmids have a selectable marker and an origin of replication. In addition certain plasmids may also contain a centromeric sequence. These centromeric plasmids are generally a single or low copy plasmid. Plasmids without a centromeric sequence and utilizing either a 2 micron (S. cerevisiae) or 1.6 micron (K. lactis) replication origin are high copy plasmids. The selectable marker can be either prototrophic, such as HIS3, TRP1, LEU2, URA3 or ADE2, or antibiotic resistance, such as, bar, ble, hph, or kan.

[0311] In another embodiment, heterologous control elements can be used to activate or repress expression of endogenous genes. Additionally, when expression is to be repressed or eliminated, the gene for the relevant enzyme, protein or RNA can be eliminated by known deletion techniques.

[0312] As described herein, any yeast within the scope of the disclosure can be identified by selection techniques specific to the particular enzyme being expressed, over-expressed or repressed. Methods of identifying the strains with the desired phenotype are well known to those skilled in the art. Such methods include, without limitation, PCR, RT-PCR, and nucleic acid hybridization techniques such as Northern and Southern analysis, altered growth capabilities on a particular substrate or in the presence of a particular substrate, a chemical compound, a selection agent and the like. In some cases, immunohistochemistry and biochemical techniques can be used to determine if a cell contains a particular nucleic acid by detecting the expression of the encoded polypeptide. For example, an antibody having specificity for an encoded enzyme can be used to determine whether or not a particular yeast cell contains that encoded enzyme. Further, biochemical techniques can be used to determine if a cell contains a particular nucleic acid molecule encoding an enzymatic polypeptide by detecting a product produced as a result of the expression of the enzymatic polypeptide. For example, transforming a cell with a vector encoding acetolactate synthase and detecting increased acetolactate concentrations compared to a cell without the vector indicates that the vector is both present and that the gene product is active. Methods for detecting specific enzymatic activities or the presence of particular products are well known to those skilled in the art. For example, the presence of acetolactate can be determined as described by Hugenholtz and Starrenburg, 1992, Appl. Micro. Biot. 38:17-22.

Methods for the Overexpression of NFS1 and/or ISD11 Genes

[0313] Overexpression of the NFS1 and/or ISD11 genes may be accomplished by any number of methods. In one embodiment, overexpression of the NFS1 and/or ISD11 genes may be accomplished with the use of plasmid vectors that function in yeast. In exemplary embodiments, the expression of NFS1, ISD11, and/or homologous genes may be increased by overexpressing the genes on a CEN plasmid or alternative plasmids with a similar copy number. In one embodiment, NFS1 or a homolog thereof is overexpressed on a CEN plasmid or alternative plasmids with a similar copy number. In another embodiment, ISD11 or a homolog thereof is overexpressed on a CEN plasmid or alternative plasmids with a similar copy number. In yet another embodiment, NFS1 and ISD11 or homologs thereof are overexpressed on a CEN plasmid or alternative plasmids with a similar copy number.

[0314] In further embodiments, expression of genes from single or multiple copy integrations into the chromosome of the cell may be useful. Use of a number of promoters, such as TDH3, TEF1, CCW12, PGK1, and ENO2, may be utilized. As would be understood in the art, the expression level may be fine-tuned by using a promoter that achieves the optimal expression (e.g., optimal overexpression) level in a given yeast. Different levels of expression of the genes may be achieved by using promoters with different levels of activity, either in single or multiple copy integrations or on plasmids. An example of such a group of promoters is a series of truncated PDC1 promoters designed to provide different strength promoters. Alternatively, promoters that are active under desired conditions, such as growth on glucose, may be used. For example, a promoter from one of the glycolytic genes, the PDC1 promoter, and a promoter from one of the ADH genes in S. cerevisiae may all be useful. Also, embodiments are exemplified using the yeast S. cerevisiae. However, other yeasts, such as those from the genera listed herein may also be used.

### Methods for the Overexpression of AFT Genes

[0315] Overexpression of the AFT1 and AFT2 genes may be accomplished by any number of methods. In one embodiment, overexpression of the AFT1 and AFT2 genes may be accomplished with the use of plasmid vectors that function in yeast. In exemplary embodiments, the expression of AFT1, AFT2, and/or homologous genes may be increased by overexpressing the genes on a CEN plasmid or alternative plasmids with a similar copy number. In one embodiment, AFT1 or a homolog thereof is overexpressed on a CEN plasmid or alternative plasmids with a similar copy number. In another embodiment, AFT2 or a homolog thereof is overexpressed on a CEN plasmid or alternative plasmids with a similar copy number. In yet another embodiment, AFT1 and AFT2 or homologs thereof are overexpressed on a CEN plasmid or alternative plasmids with a similar copy number.

[0316] In further embodiments, expression of genes from single or multiple copy integrations into the chromosome of the cell may be useful. Use of a number of promoters, such as TDH3, TEF1, CCW12, PGK1, and ENO2, may be utilized. As would be understood in the art, the expression level may be fine-tuned by using a promoter that achieves the optimal expression (e.g. optimal overexpression) level in a given yeast. Different levels of expression of the genes may be achieved by using promoters with different levels of activity, either in single or multiple copy integrations or on plasmids. An example of such a group of promoters is a series of truncated PDC1 promoters designed to provide different strength promoters. Alternatively promoters that are active under desired conditions, such as growth on glucose, may be used. For example a promoter from one of the glycolytic genes, the PDC1 promoter, and a promoter from one of the ADH genes in S. cerevisiae may all be useful. Also, embodiments are exemplified using the yeast S. cerevisiae. However, other yeasts, such as those from the genera listed herein may also be used.

[0317] As described herein, overexpression of the Aft1 protein or a homolog thereof may be obtained by expressing a constitutively active Aft1 or a homolog thereof. In one embodiment, the constitutively active Aft1 or a homolog thereof comprises a mutation at a position corresponding to the cysteine 291 residue of the native S. cerevisiae Aft1 (SEQ ID NO: 2). In a specific embodiment, the cysteine 291 residue is replaced with a phenylalanine residue.

[0318] As described herein, overexpression of the Aft2 protein or a homolog thereof may be obtained by expressing a constitutively active Aft2 or a homolog thereof. In one embodiment, the constitutively active Aft2 or a homolog thereof comprises a mutation at a position corresponding to the cysteine 187 residue of the native S. cerevisiae Aft2 (SEQ ID NO: 2). In a specific embodiment, the cysteine 187 residue is replaced with a phenylalanine residue.

### Increase of Enzymatic Activity

[0319] Yeast microorganisms of the invention may be further engineered to have increased activity of enzymes. The term “increased” as used herein with respect to a particular enzymatic activity refers to a higher level of enzymatic activity than that measured in a comparable yeast cell of the same species. For example, overexpression of a specific enzyme can lead to an increased level of activity in the cells for that enzyme. Increased activities for enzymes involved in glycolysis or the isobutanol pathway would result in increased productivity and yield of isobutanol.

[0320] Methods to increase enzymatic activity are known to those skilled in the art. Such techniques may include increasing the expression of the enzyme by increased copy number and/or use of a strong promoter, introduction of mutations to relieve negative regulation of the enzyme, introduction of specific mutations to increase specific activity and/or decrease the Km for the substrate, or by directed evolution. See, e.g., Methods in Molecular Biology (vol. 231), ed. Arnold and Georgiou, Humana Press (2003).

### Methods of Using Recombinant Microorganisms for High-Yield Fermentations

[0321] For a biocatalyst to produce a beneficial metabolite most economically, it is desirable to produce said metabolite at a high yield. Preferably, the only product produced is the desired metabolite, as extra products (i.e. by-products) lead to a reduction in the yield of the desired metabolite and an increase in capital and operating costs, particularly if the extra products have little or no value. These extra products also require additional capital and operating costs to separate these products from the desired metabolite.

[0322] In one aspect, the present invention provides a method of producing a beneficial metabolite derived from a DHAD-requiring biosynthetic pathway. In one embodiment, the method includes cultivating a recombinant microorganism comprising a DHAD-requiring biosynthetic pathway in a culture medium containing a feedstock providing the carbon source until a recoverable quantity of the beneficial metabolite is produced and optionally, recovering the metabolite. In an exemplary embodiment, said recombinant microorganism has been engineered to overexpress one or more polynucleotides encoding one or more Nfs1 proteins or homologs thereof and/or one or more polynucleotides encoding one or more Isd11 proteins or homologs thereof. The beneficial metabolite may be derived from any DHAD-requiring biosynthetic pathway, including, but not limited to, biosynthetic pathways for the production of isobutanol, 3-methyl-1-butanol, 2-methyl-1-butanol, valine, isoleucine, leucine, and pantothenic acid. In a specific embodiment, the beneficial metabolite is isobutanol.

[0323] In another aspect, the present invention provides a method of producing a beneficial metabolite derived from a DHAD-requiring biosynthetic pathway. In one embodiment, the method includes cultivating a recombinant microorganism comprising a DHAD-requiring biosynthetic pathway in a culture medium containing a feedstock providing the carbon source until a recoverable quantity of the beneficial metabolite is produced and optionally, recovering the metabolite. In an exemplary embodiment, said recombinant microorganism has been engineered to overexpress a polynucleotide encoding Aft1 (SEQ ID NO: 2) and/or Aft2 (SEQ ID NO: 4) or a homolog thereof. The beneficial metabolite may be derived from any DHAD-requiring biosynthetic pathway, including, but not limited to, biosynthetic pathways for the production of isobutanol, 3-methyl-1-butanol, 2-methyl-1-butanol, valine, isoleucine, leucine, and pantothenic acid. In a specific embodiment, the beneficial metabolite is isobutanol.

[0324] In a method to produce a beneficial metabolite from a carbon source, the yeast microorganism is cultured in an appropriate culture medium containing a carbon source. In certain embodiments, the method further includes isolating the beneficial metabolite from the culture medium. For example, isobutanol may be isolated from the culture medium by any method known to those skilled in the art, such as distillation, pervaporation, or liquid-liquid extraction

[0325] In one embodiment, the recombinant microorganism may produce the beneficial metabolite from a carbon source at a yield of at least 5 percent theoretical. In another embodiment, the microorganism may produce the beneficial metabolite from a carbon source at a yield of at least about 10 percent, at least about 15 percent, about least about 20 percent, at least about 25 percent, at least about 30 percent, at least about 35 percent, at least about 40 percent, at least about 45 percent, at least about 50 percent, at least about 55 percent, at least about 60 percent, at least about 65 percent, at least about 70 percent, at least about 75 percent, at least about 80 percent, at least about 85 percent, at least about 90 percent, at least about 95 percent, or at least about 97.5% theoretical. In a specific embodiment, the beneficial metabolite is isobutanol.

[0326] This invention is further illustrated by the following examples that should not be construed as limiting. The contents of all references, patents, and published patent applications cited throughout this application, as well as the Figures and the Sequence Listing, are incorporated herein by reference for all purposes.

### EXAMPLES

### General Materials and Methods for Examples

[0327] Media: Media used were standard yeast medium (for example Sambrook, J., Russel, D. W. Molecular Cloning, A Laboratory Manual. 3rd ed. 2001, Cold Spring Harbor, N.Y.: Cold Spring Harbor Laboratory Press and Guthrie, C. and Fink, G. R. eds. Methods in Enzymology Part B: Guide to Yeast Genetics and Molecular and Cell Biology 350:3-623 (2002)). YP medium contains 1% (w/v) yeast extract, 2% (w/v) peptone. YPD is YP containing 2% (w/v) glucose.

[0328] S. cerevisiae Transformations: The yeast strain of interest was grown on YPD medium. The strain was re-suspended in 100 mM lithium acetate. Once the cells were re-suspended, a mixture of DNA (final volume of 15 μL with sterile water), 72 μL 50% w/v PEG, 10 μL 1 M lithium acetate, and 3 μL of denatured salmon sperm DNA (10 mg/mL) was prepared for each transformation. In a 1.5 mL tube, 15 μL of the cell suspension was added to the DNA mixture (100 μL), and the transformation suspension was vortexed for 5 short pulses. The transformation was incubated for 30 min at 30° C., followed by incubation for 22 min at 42° C. The cells were collected by centrifugation (18,000 rcf, 10 sec, 25° C.). The cells were resuspended in 1 mL YPD and after an overnight recovery shaking at 30° C. and 250 rpm, the cells were spread over YPD+0.2 g/L G418+0.1 g/L hygromycin selective plates. Transformants were then single colony purified onto selective plates containing appropriate antibiotics.

[0329] Preparation of Yeast Lysate: Cells were Thawed on Ice and Resuspended in lysis buffer (50 mM Tris pH 8.0, 5 mM MgSO₄) such that the result was a 20% cell suspension by mass. 1000 μL of glass beads (0.5 mm diameter) were added to a 1.5 mL microcentrifuge tube and 875 μL of cell suspension was added. Yeast cells were lysed using a Retsch MM301 mixer mill (Retsch Inc. Newtown, Pa.), mixing 6×1 min each at full speed with 1 min incubations on ice between each bead-beating step. The tubes were centrifuged for 10 min at 23,500 rcf at 4° C. and the supernatant was removed for use. The lysates were held on ice until assayed.

[0330] DHAD Assay: Each sample was diluted in DHAD assay buffer (50 mM Tris pH 8, 5 mM MgSO₄) to a 1:10 and a 1:40 to 1:100 dilution. Three samples of each lysate were assayed, along with no lysate controls. 10 μL of each sample (or DHAD assay buffer) was added to 0.2 mL PCR tubes. Using a multi-channel pipette, 90 μL of the substrate was added to each tube (substrate mix was prepared by adding 4 mL DHAD assay buffer to 0.5 mL 100 mM DHIV). Samples were put in a thermocycler (Eppendorf Mastercycler) at 35° C. for 30 min followed by a 5 min incubation at 95° C. Samples were cooled to 4° C. on the thermocycler, then centrifuged at 3000 rcf for 5 min. Finally, 75 μL of supernatant was transferred to new PCR tubes and submitted to analytics for analysis by Liquid Chromatography, method 2. DHAD activity units were calculated as μmol KIV produced/min/mg total cell lysate protein in the assay.

[0331] Protein Concentration Determination: Yeast lysate protein concentration was determined using the BioRad Bradford Protein Assay Reagent Kit (Cat#500-0006, BioRad Laboratories, Hercules, Calif.) and using BSA for the standard curve. Briefly, 10 μL standard or lysate were added into a microcentrifuge tube. The samples were diluted to fit in the linear range of the standard curve (1:40). 500 μL of 1:4 diluted and filtered Bio-Rad protein assay dye was added to the blank and samples and then vortexed. Samples were incubated at room temperature for 6 min, transferred into cuvettes and the OD₅₉₅ was determined in a spectrophotometer. The linear regression of the standards was then used to calculate the protein concentration in each sample.

[0332] Gas Chromatography: Analysis of volatile organic compounds including isobutanol, was performed on a HP 5890/6890/7890 gas chromatograph fitted with an HP 7673 Autosampler, a ZB-FFAP column (Phenomenex; 30 m length, 0.32 mm ID, 0.25 μM film thickness) or equivalent connected to a flame ionization detector (FID). The temperature program was as follows: 200° C. for the injector, 300° C. for the detector, 100° C. oven for 1 min, 70° C./min gradient to 230° C., and then hold for 2.5 min. Analysis was performed using authentic standards (>99%, obtained from Sigma-Aldrich) and a 5-point calibration curve with 1-pentanol as the internal standard.

[0333] Liquid Chromatography, Method 1: Analysis of organic acid metabolites, specifically pyruvate, acetate, 2,3-dihydroxy-isovalerate, and 2,3-butanediol, was performed on an HP-1200 High Performance Liquid Chromatography system equipped with two Rezex RFQ 150×4.6 mm columns in series. Organic acid metabolites were detected using an HP-1100 UV detector (210 nm) and refractive index. The column temperature was 60° C. This method was isocratic with 0.0180 N H₂SO₄ in Milli-Q water as mobile phase. Flow was set to 1.1 mL/min. Injection volume was 20 μL and run time was 16 min. Analysis was performed using authentic standards (>99%, obtained from Sigma-Aldrich, with the exception of DHIV (2,3-dihydroxy-3-methyl-butanoate, CAS 1756-18-9), which was custom synthesized at Caltech (Cioffi, E. et al. Anal Biochem 104 pp. 485 (1980)), and a 5-point calibration curve.

[0334] Liquid Chromatography, Method 2: Analysis of 2-keto-isovalerate (KIV), the product indicating DHAD activity, was measured using liquid chromatography. DNPH reagent (12 mM 2,4-Dinitrophenyl Hydrazine, 20 mM Citric Acid pH 3.0, 80% Acetonitrile, 20% MilliQ H₂O) was added to each sample in a 1:1 ratio. Samples were incubated for 30 min at 70° C. in a thermo-cycler (Eppendorf, Mastercycler). Analysis of KIV was performed on an HP-1200 High Performance Liquid Chromatography system equipped with an Eclipse XDB C-18 reverse phase column (Agilent) and a C-18 reverse phase column guard (Phenomenex). KIV was detected using an HP-1100 UV detector (360 nm). The column temperature was 50° C. This method was isocratic with 70% acetonitrile 2.5% phosphoric acid (4%), 27.5% water as mobile phase. Flow was set to 3 mL/min. Injection size was 10 μL and run time was 2 min.

### Example 1

### Overexpression of AFT1 Increases DHAD Activity and Isobutanol Productivity, Titer, and Yield in Fermentation Vessels

[0335] The purpose of this example is to demonstrate that overexpression of AFT1 increases DHAD activity, isobutanol titer, productivity, and yield.

[0336] Media: Medium used for the fermentation was YP+80 g/L glucose+0.2 g/L G418+0.1 g/L hygromycin+100 μM CuSO₄.5H₂O+1% v/v ethanol. The medium was filter sterilized using a 1 L bottle top Corning PES 0.22 μm filter (431174). Medium was pH adjusted to 6.0 in the fermenter vessels using 6N KOH.

[0337] Vessel Preparation and Operating Conditions: Batch fermentations were conducted using six 2 L top drive motor DasGip vessels with a working volume of 0.9 L per vessel. Vessels were sterilized, along with the appropriate dissolved oxygen probes and pH probes, for 60 min at 121° C. pH probes were calibrated prior to sterilization, however, dissolved oxygen probes were calibrated post sterilization in order to allow for polarization.

[0338] Process Control Parameters: Initial volume, 900 mL. Temperature, 30° C. pH 6.0, pH was controlled using 6N KOH and 2N H₂SO₄ (Table 4).

TABLE 4
Process control parameters.

| Growth phase | Oxygen transfer rate | 10 | mM/h |
|---|---|---|---|
| | Air overlay | 5.0 | slph |
| | Agitation | 700 | rpm |
| | Dissolved oxygen | Not controlled | |
| Fermentation phase | Oxygen transfer rate | 0.5 mM/h to 1.8 mM/h* | |
| | Air overlay | 5.0 | slph |

| | |
|---|---|
| Agitation | 300 rpm/400 rpm* |
| Dissolved oxygen | Not controlled |

*Oxygen transfer rate increased from 0.5 mM/h to 1.8 mM/h by increase in agitation from 300 rpm to 400 rpm 56 h post inoculation.

[0339] Fermentation: The fermentation was run for 119 h. Vessels were sampled 3 times daily. Sterile 5 mL syringes were used to collect 3 mL of fermenter culture via a sterile sample port. The sample was placed in a 2 mL microfuge tube and a portion was used to measure cell density (OD₆₀₀) on a Genesys 10 spectrophotometer (Thermo Scientific). The remaining sample was filtered through a 0.22 μm pore-size Corning filter. The supernatant from each vessel was refrigerated in a 96-well, deep well plate, and stored at 4° C. prior to gas and liquid chromatography analysis (see General Methods).

[0340] Off-Gas Measurements: On-line continuous measurement of each fermenter vessel off-gas by mass spectrometry analysis was performed for oxygen, isobutanol, ethanol, carbon dioxide, and nitrogen throughout the experiment. Fermentor off-gas was analyzed by Prima dB mass spectrometer (Thermo, Waltham, Mass.) for nitrogen, oxygen, argon, carbon dioxide, isobutanol, ethanol, and isobutyraldehyde. A reference stream of similar composition to the inlet fermentor air was also analyzed. The mass spectrometer cycles through the reference air and fermentor off-gas streams (one by one) and measures percent concentration of these gases after an 8.3 min settling time to ensure representative samples. Equation 1 is a derived value expression input into the mass spectrometer software to determine OTR using percent oxygen and percent nitrogen from the reference air (% O₂ᵢₙ and % N₂ᵢₙ) and fermentor off-gas (% O₂ₒᵤₜ and % N₂₀ᵤₜ). Nitrogen is not involved in cellular respiration, and therefore, can be used to compensate for outlet oxygen dilution caused by the formation of CO₂. The inlet flow is calculated from Equation 2 based on the ideal gas law and is standardized to 1.0 sLph flow rate and 1.0 L fermentor working volume to yield a derived value OTR in mmol/L/h from the mass spectrometer. This derived value OTR is then multiplied by actual inlet flow rate (sLph) and divided by actual working volume (L) in fermentation spreadsheets to obtain an OTR for specific operating conditions.

$$\begin{matrix}OTR = [ \% O {2}_{in} - ( \% O {2}_{out} * \frac{\% N {2}_{in}}{\% N {2}_{out}} ) ] * {Flow}_{in} . & Equation 1 \\ {Flow}_{in} = \frac{1 L}{h} * [ \frac{0.83 atm}{0.08206 \frac{L atm}{mol K} * 294 K * 1 L} ] * \frac{1000 mmol}{mol} . & Equation 2\end{matrix}$$

[0341] See the General Methods for a description of how the yeast transformations were performed, as well as a description of how the yeast lysate was prepared. The DHAD assay and protein concentration assay are also described in the general methods section. Strains, plasmids, and the gene/protein sequences used in Example 1 are described in Tables 5, 6, and 7, respectively.

TABLE 5
Genotype of strain disclosed in Example 1.

| GEVO Number | Genotype |
|---|---|
| GEVO2843 | S. cerevisiae CEN.PK2, MATa ura3 leu2 |
| | his3 trp1 |
| | pdc1Δ::[P_{CUP1}: Bs_alsS1_coSc: T_{CYC1}: |
| | P_{PGK1}: Ll_kivD2: P_{ENO2}: Sp_HIS5] |
| | pdc5Δ::[LEU2-bla-P_{TEF1}: ILV3ΔN: |
| | P_{TDH3}: Ec_ilvC_coSc^{Q110V}] |
| | pdc6Δ::[URA3: bla; P_{TEF1}: Ll_kivD2: |
| | P_{TDH3}: Dm_ADH] |
| | {evolved for C2 supplement-independence, |
| | glucose tolerance and faster growth} |

TABLE 6
Plasmids disclosed in Example 1.

| Plasmid Name | Relevant Genes/Usage | Genotype |
|---|---|---|
| pGV2227 | Plasmid pGV2227 is a | P_{TDH3}: Ec_ilvC_coSc^{Q110V} |
| | 2 micron plasmid | P_{TEF1}: Ll_ilvD_coSc |
| | expressing KARI, | P_{PGK1}-Ll_kivD2_coEc |
| | DHAD, KIVD, and ADH | P_{ENO2}_{_{—}}Ll_adhA |
| | | 2μ ori, bla, G418R |
| pGV2196 | Empty CEN plasmid | P_{TDH3}: empty |
| | | P_{TEF1}: empty |
| | | P_{PGK1}: empty |
| | | CEN ori, bla, HygroR |
| pGV2472 | CEN plasmid expressing | P_{TDH3}: Sc_AFT1 |
| | AFT1 | P_{TEF1}: empty |
| | | P_{PGK1}: empty |
| | | CEN ori, bla, HygroR |

TABLE 7
Nucleotide and amino acid sequences of genes and proteins disclosed in Examples.

| Protein | Source | Gene (SEQ ID NO) | Protein (SEQ ID NO) |
|---|---|---|---|
| AFT | S. cerevisiae | Sc_AFT1 (SEQ ID NO: 1) | Sc_Aft1 (SEQ ID NO: 2) |
| | S. cerevisiae | Sc_AFT2 (SEQ ID NO: 3) | Sc_Aft2 (SEQ ID NO: 4) |
| | K. lactis | Kl_AFT (SEQ ID NO: 13) | Kl_Aft (SEQ ID NO: 14) |
| | K. marxianus | Km_AFT (SEQ ID NO: 29) | Km_Aft (SEQ ID NO: 30) |
| | I. orientalis | Io_AFT1-2 (SEQ ID NO: 33) | Io_Aft1-2 (SEQ ID NO: 34) |
| ALS | B. subtilis | Bs_alsS1_coSc (SEQ ID NO: 40) | Bs_AlsS1 (SEQ ID NO: 41) |
| KARI | E. coli | Ec_ilvC_coSc^{Q110V} (SEQ ID NO: 42) | Ec_IlvC^{Q110V} (SEQ ID NO: 43) |
| | E. coli | Ec_ilvC_coSc^{P2D1A1} (SEQ ID NO: 44) | Ec_IlvC^{P2D1A1} (SEQ ID NO: 45) |
| KIVD | L. lactis | Ll_kivd2_coEc (SEQ ID NO: 46) | Ll_Kivd2 (SEQ ID NO: 47) |
| DHAD | L. lactis | Ll_ilvD_coSc (SEQ ID NO: 48) | Ll_IlvD (SEQ ID NO: 49) |
| | S. cerevisiae | Sc_ILV3ΔN20 (SEQ ID NO: 50) | Sc_Ilv3ΔN20 (SEQ ID NO: 51) |
| | S. mutans | Sm_ilvD_coSc (SEQ ID NO: 52) | Sm_IlvD (SEQ ID NO: 53) |
| | N. crassa | Nc_ILVD2_coSc(SEQ ID NO: 54) | Nc_IlvD2 (SEQ ID NO: 55) |
| ADH | D. melanogaster | Dm_ADH (SEQ ID NO: 56) | Dm_Adh (SEQ ID NO: 57) |
| | L. lactis | Ll_adhA (SEQ ID NO: 58) | Ll_AdhA (SEQ ID NO: 59) |
| | L. lactis | Ll_adhA^{RE1} (SEQ ID NO: 60) | Ll_AdhA^{RE1} (SEQ ID NO: 61) |
| TFC1 | S. cerevisiae | TFC1 (SEQ ID NO: 202) | Tfc1 (SEQ ID NO: 203) |

[0342] GEVO2843 was co-transformed with two plasmids (Table 8). GEVO3342 contains plasmids pGV2227 and pGV2196; GEVO3343 contains plasmids pGV2227 and pGV2472.

TABLE 8
Indicates the strains containing plasmids
transformed together into strain GEVO2843.

| GEVO | Plasmid 1 | Plasmid 2 |
|---|---|---|
| 3342 | pGV2227 (DHAD) | pGV2196 (no AFT1) |
| 3343 | pGV2227 (DHAD) | pGV2472 (AFT1) |

[0343] DHAD Assay Results: The in vitro DHAD enzymatic activity of lysates from the microaerobic fermentation of GEVO3342 and GEVO3343 were carried out as described above. Overexpression of AFT1 from a CEN plasmid resulted in a three-fold increase in specific DHAD activity (U/mg total cell lysate protein). Data is presented as specific DHAD activity (U/mg total cell lysate protein) averages from technical triplicates with standard deviations. DHAD activity for GEVO3342 (control) was 0.066±0.005 U/mg and DHAD activity for GEVO3343 (AFT1 over-expressed) was 0.215±0.008 U/mg at the end of the fermentation (119 h).

[0344] Isobutanol Results: Isobutanol titers, rates and yields were calculated based on the experiment run in batch fermentors. Table 9 shows the increase in isobutanol titer, rate and yield in the strain overexpressing the AFT1 gene. The overexpression of AFT1 from a CEN plasmid (GEVO3343) resulted in an increase in isobutanol titer, an increase in isobutanol yield, and an increase in isobutanol rate.

TABLE 9
Isobutanol titer, rate and yield for
replicate fermentation experiments.

| | GEVO3342 | GEVO3342 | GEVO3343 | GEVO3343 |
|---|---|---|---|---|
| | control plasmid | | Aft1 gene on a CEN plasmid | |
| Titer (g/L) | 3.66 | 3.96 | 5.69 | 5.80 |
| Rate (g/L/h) | 0.03 | 0.03 | 0.05 | 0.05 |
| Yield | 19 | 20 | 34 | 34 |
| (% theor.) | | | | |

[0345] Change in metabolic by-products: The strain transformed with the AFT1 gene expressed on the CEN plasmid (GEVO3343) produced less pyruvate, acetate, DHIV (dihydroxyisovalerate)/DH2MB (2,3-dihydroxy-2-methylbutanoic acid), and 2,3-butanediol than the strain with the control plasmid (GEVO3342) during the fermentation. There was a six fold decrease in pyruvate, one fold decrease in acetate, one and a half fold decrease in DHIV/DH2MB, and six fold decrease in 2,3-butanediol.

### Example 2

### Overexpression of AFT2 Increases DHAD Activity

[0346] The purpose of this example is to demonstrate that overexpression of AFT2 increases DHAD activity. Methods of strain construction and cloning techniques are described in Example 1. Strain GEVO2843 is described in Table 5.

TABLE 10
Plasmids disclosed in Example 2.

| Plasmid Name | Relevant Genes/Usage | Genotype |
|---|---|---|
| pGV2247 | Plasmid pGV2247 is a | P_{TDH3}: Ec_ilvC_coSc^{P2D1A1} |
| | 2 micron plasmid | P_{TEF1}: Ll_ilvD_coSc |
| | expressing KARI, | P_{PGK1}-Ll_kivD2_coEc |
| | DHAD, KIVD, and ADH | P_{ENO2}: Ll_adhA |
| | | 2μ ori, bla, G418R |
| pGV2196 | Empty CEN plasmid | P_{TDH3}: empty |
| | | P_{TEF1}: empty |
| | | P_{PGK1}: empty |
| | | CEN ori, bla, HygroR |
| pGV2627 | CEN plasmid expressing | P_{TDH3}: empty |
| | AFT2 | P_{TEF1}: empty |
| | | P_{PGK1}: Sc_AFT2 |
| | | CEN ori, bla, HygroR |

### Methods

[0347] Methods for yeast transformations and the preparation of yeast lysates are described in the general methods. The DHAD assay, the liquid chromatography, method 2, assay, and assays for measuring protein concentration are described in the general methods.

[0348] Results for DHAD Activity: Data is presented as specific DHAD activity (U/mg total cell lysate protein) averages from biological and technical triplicates with standard deviations. DHAD activity in GEVO2843 (Table 5) transformed with pGV2247+pGV2196 (no AFT2) was 0.358±0.009 U/mg, DHAD activity for pGV2247+pGV2627 (contains AFT2) was 0.677±0.072 U/mg. The overexpression of AFT2 increased the amount of DHAD activity in the strain.

### Example 3

### Overexpression of AFT1 Increases DHAD Activity for DHAD Enzymes from Multiple Organisms

[0349] The purpose of this example is to demonstrate that overexpression of AFT1 increases DHAD activity for DHAD enzymes from multiple organisms.

[0350] Strains and plasmids used in Example 4 are described in Tables 11 and 12, respectively.

TABLE 11
Genotype of strains disclosed in Example 3.

| GEVO Number | Genotype | Plasmid |
|---|---|---|
| GEVO3626 | Saccharomyces cerevisiae MATa ura3 leu2 his3 trp1 gpd1::T_{KI}_{_{—}}_{URA3} | None |
| | gpd2::T_{KI}_{_{—}}_{URA3} pdc1::P_{PDC1}: Ll_kivD2_coSc5: P_{FBA1}: LEU2: T_{LEU2}- | |
| | P_{ADH1}: Bs_alsS1_coSc: T_{CYC1}: P_{PGK1}: Ll_kivD2_coEc: P_{ENO2}: Sp_HIS5 | |
| | pdc5::T_{KI}_{_{—}}_{URA3}_{_{—}}ₛₕₒᵣₜ: P_{FBA1}: KI_URA3: T_{KI}_{_{—}}_{URA3} | |
| | pdc6::P_{TEF}: Ll_ilvD_coSc_P_{TDH3}: Ec_ilvC_coSc^{P2D1-A1}: | |
| | P_{ENO2}: Ll_adhA: P_{FBA1}: Sc_TRP1 {evolved for C2 supplement-independence, | |
| | glucose tolerance and faster growth} | |
| GEVO3873 | Saccharomyces cerevisiae MATa ura3 leu2 his3 trp1 gpd1::T_{KI}_{_{—}}_{URA3} | pGV2603 |
| | gpd2::T_{KI}_{_{—}}_{URA3} | |
| | pdc1::P_{PDC1}: Ll_kivD2_coSc5: P_{FBA1}: LEU2: T_{LEU2}: P_{ADH1}: Bs_alsS1_coSc: T_{CYC1}: P_{PGK1}: | |
| | Ll_kivD2_coEc: P_{ENO2}: Sp_HIS5 pdc5::T_{KI}_{_{—}}_{URA3}_{_{—}}ₛₕₒᵣₜ: P_{FBA1}: KI_URA3: T_{KI}_{_{—}}_{URA3} | |
| | pdc6::P_{TEF}: Ll_ilvD_coSc_P_{TDH3}: Ec_ilvC_coSc^{P2D1-A1}: | |
| | P_{ENO2}: Ll_adhA: P_{FBA1}: Sc_TRP1 {evolved for C2 supplement-independence, | |
| | glucose tolerance and faster growth} | |
| GEVO3874 | Saccharomyces cerevisiae MATa ura3 leu2 his3 trp1 gpd1::T_{KI}_{_{—}}_{URA3} | pGV2603 |
| | gpd2::T_{KI}_{_{—}}_{URA3} | |
| | pdc1::P_{PDC1}: Ll_kivD2_coSc5: P_{FBA1}: LEU2: T_{LEU2}: P_{ADH1}: Bs_alsS1_coSc: T_{CYC1}: P_{PGK1}: | |
| | Ll_kivD2_coEc: P_{ENO2}: Sp_HIS5 pdc5::T_{KI}_{_{—}}_{URA3}_{_{—}}ₛₕₒᵣₜ: P_{FBA1}: KI_URA3: T_{KI}_{_{—}}_{URA3} | |
| | pdc6::P_{TEF}: Ll_ilvD_coSc_P_{TDH3}: Ec_ilvC_coSc^{P2D1-A1}: | |
| | P_{ENO2}: Ll_adhA: P_{FBA1}: Sc_TRP1 {evolved for C2 supplement-independence, | |
| | glucose tolerance and faster growth} | |
| GEVO3875 | Saccharomyces cerevisiae MATa ura3 leu2 his3 trp1 gpd1::T_{KI}_{_{—}}_{URA3} | pGV2607 |
| | gpd2::T_{KI}_{_{—}}_{URA3} | |
| | pdc1::P_{PDC1}: Ll_kivD2_coSc5: P_{FBA1}: LEU2: T_{LEU2}: P_{ADH1}: Bs_alsS1_coSc: T_{CYC1}: P_{PGK1}: | |
| | Ll_kivD2_coEc: P_{ENO2}: Sp_HIS5 pdc5::T_{KI}_{_{—}}_{URA3}_{_{—}}ₛₕₒᵣₜ: P_{FBA1}: KI_URA3: T_{KI}_{_{—}}_{URA3} | |
| | pdc6::P_{TEF}: Ll_ilvD_coSc_P_{TDH3}: Ec_ilvC_coSc^{P2D1-A1}: | |
| | P_{ENO2}: Ll_adhA: P_{FBA1}: Sc_TRP1 {evolved for C2 supplement-independence, | |
| | glucose tolerance and faster growth} | |
| GEVO3876 | Saccharomyces cerevisiae MATa ura3 leu2 his3 trp1 gpd1::T_{KI}_{_{—}}_{URA3} | pGV2608 |
| | gpd2::T_{KI}_{_{—}}_{URA3} | |
| | pdc1::P_{PDC1}: Ll_kivD2_coSc5: P_{FBA1}: LEU2: T_{LEU2}: P_{ADH1}: Bs_alsS1_coSc: T_{CYC1}: P_{PGK1}: | |
| | Ll_kivD2_coEc: P_{ENO2}: Sp_HIS5 pdc5::T_{KI}_{_{—}}_{URA3}_{_{—}}ₛₕₒᵣₜ: P_{FBA1}: KI_URA3: T_{KI}_{_{—}}_{URA3} | |
| | pdc6::P_{TEF}: Ll_ilvD_coSc_P_{TDH3}: Ec_ilvC_coSc^{P2D1-A1}: | |
| | P_{ENO2}: Ll_adhA: P_{FBA1}: Sc_TRP1 {evolved for C2 supplement-independence, | |
| | glucose tolerance and faster growth} | |
| GEVO3877 | Saccharomyces cerevisiae MATa ura3 leu2 his3 trp1 gpd1::T_{KI}_{_{—}}_{URA3} | pGV2608 |
| | gpd2::T_{KI}_{_{—}}_{URA3} | |
| | pdc1::P_{PDC1}: Ll_kivD2_coSc5: P_{FBA1}: LEU2: T_{LEU2}: P_{ADH1}: Bs_alsS1_coSc: T_{CYC1}: P_{PGK1}: | |
| | Ll_kivD2_coEc: P_{ENO2}: Sp_HIS5 pdc5::T_{KI}_{_{—}}_{URA3}_{_{—}}ₛₕₒᵣₜ: P_{FBA1}: KI_URA3: T_{KI}_{_{—}}_{URA3} | |
| | pdc6::P_{TEF}: Ll_ilvD_coSc_P_{TDH3}: Ec_ilvC_coSc^{P2D1-A1}: | |
| | P_{ENO2}: Ll_adhA: P_{FBA1}: Sc_TRP1 {evolved for C2 supplement-independence, | |
| | glucose tolerance and faster growth} | |
| GEVO3878 | Saccharomyces cerevisiae MATa ura3 leu2 his3 trp1 gpd1::T_{KI}_{_{—}}_{URA3} | pGV2608 |
| | gpd2::T_{KI}_{_{—}}_{URA3} | |
| | pdc1::P_{PDC1}: Ll_kivD2_coSc5: P_{FBA1}: LEU2: T_{LEU2}: P_{ADH1}: Bs_alsS1_coSc: T_{CYC1}: P_{PGK1}: | |
| | Ll_kivD2_coEc: P_{ENO2}: Sp_HIS5 pdc5::T_{KI}_{_{—}} _{URA3}_{_{—}}ₛₕₒᵣₜ: P_{FBA1}: KI_URA3: T_{KI}_{_{—}} _{URA3} | |
| | pdc6::P_{TEF}: Ll_ilvD_coSc_P_{TDH3}: Ec_ilvC_coSc^{P2D1-A1}: | |
| | P_{ENO2}: Ll_adhA: P_{FBA1}: Sc_TRP1 {evolved for C2 supplement-independence, | |
| | glucose tolerance and faster growth} | |
| GEVO3879 | Saccharomyces cerevisiae MATa ura3 leu2 his3 trp1 gpd1::T_{KI}_{_{—}}_{URA3} | pGV2603 + |
| | gpd2::T_{KI}_{_{—}}_{URA3} | pGV2472 |
| | pdc1::P_{PDC1}: Ll_kivD2_coSc5: P_{FBA1}: LEU2: T_{LEU2}: P_{ADH1}: Bs_alsS1_coSc: T_{CYC1}: P_{PGK1}: | |
| | Ll_kivD2_coEc: P_{ENO2}: Sp_HIS5 pdc5::T_{KI}_{_{—}} _{URA3}_{_{—}}ₛₕₒᵣₜ: P_{FBA1}: KI_URA3: T_{KI}_{_{—}} _{URA3} | |
| | pdc6::P_{TEF}: Ll_ilvD_coSc_P_{TDH3}: Ec_ilvC_coSc^{P2D1-A1}: | |
| | P_{ENO2}: Ll_adhA: P_{FBA1}: Sc_TRP1 {evolved for C2 supplement-independence, | |
| | glucose tolerance and faster growth} | |
| GEVO3880 | Saccharomyces cerevisiae MATa ura3 leu2 his3 trp1 gpd1::T_{KI}_{_{—}}_{URA3} | pGV2603 + |
| | gpd2::T_{KI}_{_{—}}_{URA3} | pGV2472 |
| | pdc1::P_{PDC1}: Ll_kivD2_coSc5: P_{FBA1}: LEU2: T_{LEU2}: P_{ADH1}: Bs_alsS1_coSc: T_{CYC1}: P_{PGK1}: | |
| | Ll_kivD2_coEc: P_{ENO2}: Sp_HIS5 pdc5::T_{KI}_{_{—}} _{URA3}_{_{—}}ₛₕₒᵣₜ: P_{FBA1}: KI_URA3: T_{KI}_{_{—}} _{URA3} | |
| | pdc6::P_{TEF}: Ll_ilvD_coSc_P_{TDH3}: Ec_ilvC_coSc^{P2D1-A1}: | |
| | P_{ENO2}: Ll_adhA: P_{FBA1}: Sc_TRP1 {evolved for C2 supplement-independence, | |
| | glucose tolerance and faster growth} | |
| GEVO3881 | Saccharomyces cerevisiae MATa ura3 leu2 his3 trp1 gpd1::T_{KI}_{_{—}}_{URA3} | pGV2603 + |
| | gpd2::T_{KI}_{_{—}}_{URA3} | pGV2472 |
| | pdc1::P_{PDC1}: Ll_kivD2_coSc5: P_{FBA1}: LEU2: T_{LEU2}: P_{ADH1}: Bs_alsS1_coSc: T_{CYC1}: P_{PGK1}: | |
| | Ll_kivD2_coEc: P_{ENO2}: Sp_HIS5 pdc5::T_{KI}_{_{—}} _{URA3}_{_{—}}ₛₕₒᵣₜ: P_{FBA1}: KI_URA3: T_{KI}_{_{—}} _{URA3} | |
| | pdc6::P_{TEF}: Ll_ilvD_coSc_P_{TDH3}: Ec_ilvC_coSc^{P2D1-A1}: | |
| | P_{ENO2}: Ll_adhA: P_{FBA1}: Sc_TRP1 {evolved for C2 supplement-independence, | |
| | glucose tolerance and faster growth} | |
| GEVO3928 | Saccharomyces cerevisiae MATa ura3 leu2 his3 trp1 gpd1::T_{KI}_{_{—}}_{URA3} | pGV2607 + |
| | gpd2::T_{KI}_{_{—}}_{URA3} | pGV2472 |
| | pdc1::P_{PDC1}: Ll_kivD2_coSc5: P_{FBA1}: LEU2: T_{LEU2}: P_{ADH1}: Bs_alsS1_coSc: T_{CYC1}: P_{PGK1}: | |
| | Ll_kivD2_coEc: P_{ENO2}: Sp_HIS5 pdc5::T_{KI}_{_{—}} _{URA3}_{_{—}}ₛₕₒᵣₜ: P_{FBA1}: KI_URA3: T_{KI}_{_{—}} _{URA3} | |
| | pdc6::P_{TEF}: Ll_ilvD_coSc_P_{TDH3}: Ec_ilvC_coSc^{P2D1-A1}: | |
| | P_{ENO2}: Ll_adhA: P_{FBA1}: Sc_TRP1 {evolved for C2 supplement-independence, | |
| | glucose tolerance and faster growth} | |
| GEVO3929 | Saccharomyces cerevisiae MATa ura3 leu2 his3 trp1 gpd1::T_{KI}_{_{—}}_{URA3} | pGV2607 + |
| | gpd2::T_{KI}_{_{—}}_{URA3} | pGV2472 |
| | pdc1::P_{PDC1}: Ll_kivD2_coSc5: P_{FBA1}: LEU2: T_{LEU2}: P_{ADH1}: Bs_alsS1_coSc: T_{CYC1}: P_{PGK1}: | |
| | Ll_kivD2_coEc: P_{ENO2}: Sp_HIS5 pdc5::T_{KI}_{_{—}} _{URA3}_{_{—}}ₛₕₒᵣₜ: P_{FBA1}: KI_URA3: T_{KI}_{_{—}} _{URA3} | |
| | pdc6::P_{TEF}: Ll_ilvD_coSc_P_{TDH3}: Ec_ilvC_coSc^{P2D1-A1}: | |
| | P_{ENO2}: Ll_adhA: P_{FBA1}: Sc_TRP1 {evolved for C2 supplement-independence, | |
| | glucose tolerance and faster growth} | |
| GEVO3930 | Saccharomyces cerevisiae MATa ura3 leu2 his3 trp1 gpd1::T_{KI}_{_{—}}_{URA3} | pGV2608 + |
| | gpd2::T_{KI}_{_{—}}_{URA3} | pGV2472 |
| | pdc1::P_{PDC1}: Ll_kivD2_coSc5: P_{FBA1}: LEU2: T_{LEU2}: P_{ADH1}: Bs_alsS1_coSc: T_{CYC1}: P_{PGK1}: | |
| | Ll_kivD2_coEc: P_{ENO2}: Sp_HIS5 pdc5::T_{KI}_{_{—}} _{URA3}_{_{—}}ₛₕₒᵣₜ: P_{FBA1}: KI_URA3: T_{KI}_{_{—}} _{URA3} | |
| | pdc6::P_{TEF}: Ll_ilvD_coSc_P_{TDH3}: Ec_ilvC_coSc^{P2D1-A1}: | |
| | P_{ENO2}: Ll_adhA: P_{FBA1}: Sc_TRP1 {evolved for C2 supplement-independence, | |
| | glucose tolerance and faster growth} | |
| GEVO3931 | Saccharomyces cerevisiae MATa ura3 leu2 his3 trp1 gpd1::T_{KI}_{_{—}}_{URA3} | pGV2608 + |
| | gpd2::T_{KI}_{_{—}}_{URA3} | pGV2472 |
| | pdc1::P_{PDC1}: Ll_kivD2_coSc5: P_{FBA1}: LEU2: T_{LEU2}: P_{ADH1}: Bs_alsS1_coSc: T_{CYC1}: P_{PGK1}: | |
| | Ll_kivD2_coEc: P_{ENO2}: Sp_HIS5 pdc5::T_{KI}_{_{—}} _{URA3}_{_{—}}ₛₕₒᵣₜ: P_{FBA1}: KI_URA3: T_{KI}_{_{—}} _{URA3} | |
| | pdc6::P_{TEF}: Ll_ilvD_coSc_P_{TDH3}: Ec_ilvC_coSc^{P2D1-A1}: | |
| | P_{ENO2}: Ll_adhA: P_{FBA1}: Sc_TRP1 {evolved for C2 supplement-independence, | |
| | glucose tolerance and faster growth} | |
| GEVO3932 | Saccharomyces cerevisiae MATa ura3 leu2 his3 trp1 gpd1::T_{KI}_{_{—}}_{URA3} | pGV2608 + |
| | gpd2::T_{KI}_{_{—}}_{URA3} | pGV2472 |
| | pdc1::P_{PDC1}: Ll_kivD2_coSc5: P_{FBA1}: LEU2: T_{LEU2}: P_{ADH1}: Bs_alsS1_coSc: T_{CYC1}: P_{PGK1}: | |
| | Ll_kivD2_coEc: P_{ENO2}: Sp_HIS5 pdc5::T_{KI}_{_{—}} _{URA3}_{_{—}}ₛₕₒᵣₜ: P_{FBA1}: KI_URA3: T_{KI}_{_{—}} _{URA3} | |
| | pdc6::P_{TEF}: Ll_ilvD_coSc_P_{TDH3}: Ec_ilvC_coSc^{P2D1-A1}: | |
| | P_{ENO2}: Ll_adhA: P_{FBA1}: Sc_TRP1 {evolved for C2 supplement-independence, | |
| | glucose tolerance and faster growth} | |

TABLE 12
Plasmids disclosed in Example 3.

| Plasmid Name | Relevant Genes/Usage | Genotype |
|---|---|---|
| pGV2603 | Plasmid pGV2603 is a 2 micron | P_{TDH3}: Ec_ilvC_coSc^{P2D1A1-his}* |
| | plasmid expressing KARI, Ll_IlvD | P_{TEF1}: Ll_ilvD_coSc |
| | DHAD, KIVD, and ADH | P_{ENO2}_{_{—}}Ll_adhA^{RE1} |
| | | 2μ ori, bla, G418R |
| pGV2607 | Plasmid pGV2607 is a 2 micron | P_{TDH3}: Ec_ilvC_coSc^{P2D1A1} |
| | plasmid expressing KARI, Nc_IlvD2 | P_{TEF1}: Nc_ilvD_coSc |
| | DHAD, KIVD, and ADH | P_{ENO2}_{_{—}}Ll_adhA^{RE1} |
| | | 2μ ori, bla, G418R |
| pGV2608 | Plasmid pGV2608 is a 2 micron | P_{TDH3}: Ec_ilvC_coSc^{P2D1A1} |
| | plasmid expressing KARI, Sm_IlvD | P_{TEF1}: Sm_ilvD_coSc |
| | DHAD, KIVD, and ADH | P_{ENO2}_{_{—}}Ll_adhA^{RE1} |
| | | 2μ ori, bla, G418R |
| pGV2472 | CEN plasmid expressing AFT1 | P_{TDH3}: Sc_AFT1 |
| | | P_{TEF1}: empty |
| | | P_{PGK1}: empty |
| | | CEN ori, bla, HygroR |

*Contains 6-his tags as compared to Ec_ilvC_coSc^{P2D1A1}

[0351] Shake Flask Fermentations: Fermentations were performed to compare the DHAD enzyme activity of strains GEVO3879, GEVO3880, GEVO3881, GEVO3928, GEVO3929, GEVO3930, GEVO3931 and GEVO3932, which overexpress AFT1 from S. cerevisiae from plasmid pGV2472, with strains GEVO3873, GEVO3874, GEVO3875, GEVO3876, GEVO3877, and GEVO3878, which do not overexpress AFT1. Strains GEVO3873, GEVO3874, GEVO3879, GEVO3880 and GEVO3881 express the Lactococcus lactis IlvD protein (Ll_IlvD) from the Ll_ilvD gene on pGV2603. Strains GEVO3875, GEVO3928 and GEVO3929 express the Neurospora crassa IlvD2 protein (Nc_ilvD2) from the Nc_ilvD2 gene on pGV2607. Strains GEVO3876, GEVO3877, GEVO3878, GEVO3930, GEVO3931 and GEVO3932 express the Streptococcus mutans IlvD protein (Sm_IlvD) from the Sm_ilvD gene on pGV2608. These plasmids were all present in the same host background strain, GEVO3626.

[0352] Strains containing plasmid pGV2472 were maintained and grown in media containing both 0.2 g/L G418 and 0.1 g/L hygromycin while strains lacking pGV2472 were maintained and grown in media containing 0.2 g/L G418. Yeast strains were inoculated from cell patches or from purified single colonies from YPD supplemented with 0.2 g/L G418 medium agar plates or from YPD supplemented with 0.2 g/L G418 and 0.1 g/L hygromycin medium agar plates into 3 mL of growth medium in 14 mL round-bottom snap-cap tubes to provide three replicates of strains carrying each plasmid or plasmid combination. The growth media used were YPD+0.2 g/L G418+1% v/v ethanol medium for strains lacking pGV2472 and YPD+0.2 g/L G418+0.1 g/L hygromycin+1% v/v ethanol medium for strains containing pGV2472. The cultures were incubated for up to 24 h shaking at an angle at 250 rpm at 30° C. Separately for each tube culture, these overnight cultures were used to inoculate 50 mL of medium in a 250 mL baffled flask with a sleeve closure to an OD₆₀₀ of 0.1. The media used were YP+50 g/L glucose+0.2 g/L G418+1% v/v ethanol medium for strains lacking pGV2472 and YP+50 g/L glucose+0.2 g/L G418+0.1 g/L hygromycin+1% v/v ethanol medium for strains containing pGV2472. These flask cultures were incubated for up to 24 h shaking at 250 rpm at 30° C. The cells from these flask cultures were harvested separately for each flask culture by centrifugation at 3000 rcf for 5 min and each cell pellet was resuspended separately in 5 mL of YP medium supplemented with 80 g/L glucose, 1% v/v stock solution of 3 g/L ergosterol and 132 g/L Tween 80 dissolved in ethanol, 200 mM MES buffer, pH 6.5, and 0.2 g/L G418. Each cell suspension was used to inoculate 50 mL of YP medium supplemented with 80 g/L glucose, 1% v/v stock solution of 3 g/L ergosterol and 132 g/L Tween 80 dissolved in ethanol, 200 mM MES buffer, pH 6.5, and 0.2 g/L G418 in a 250 mL non-baffled flask with a vented screw-cap to an OD₆₀₀ of approximately 5. These fermentations were incubated shaking at 250 rpm at 30° C. After 73 h of incubation, the cells from half of each fermentation culture were harvested by centrifugation at 3000 rcf for 5 min at 4° C. Each cell pellet was resuspended in 25 mL of cold MilliQ water and then harvested by centrifugation at 3000 rcf for 5 min at 4° C. The supernatant was removed from each pellet and the tubes containing the pellets were frozen at −80° C.

[0353] Cell lysate production, total protein quantification, DHAD assays and liquid chromatography, method 2, were performed as described in the general methods.

[0354] Overexpression of S. cerevisiae AFT1 Increased the DHAD Activity of Strains Expressing Different DHAD Enzymes: Overexpression of S. cerevisiae AFT1 increased the DHAD enzyme activity of strains expressing the L. lactis IlvD, N. crassa IlvD2 and S. mutans IlvD DHADs by at least 2.5-fold (Table 13). DHAD enzyme activities of the strains expressing the different DHADs were similar in the absence of AFT1 overexpression but were at different increased enzyme activity levels in the strains expressing the different DHADs together with AFT1 overexpression. This demonstrates that AFT1 overexpression increases the activity of multiple DHAD enzymes from several different organisms.

TABLE 13
DHAD enzyme activity results from shake flask fermentations
demonstrating increased DHAD activity from S. cerevisiae
expressing DHAD enzymes from L. lactis, N. crassa and
S. mutans and overexpressing AFT1.

| | DHAD Enzyme Activity (μmol KIV/min/mg lysate) | |
|---|---|---|
| Expressed DHAD | No AFT1 Overexpression | AFT1 Overexpression |
| Ll_IlvD | 0.27 ± 0.02 | 1.26 ± 0.16 |
| Nc_IlvD2 | 0.29 ± 0.05 | 1.14 ± 0.15 |
| Sm_IlvD | 0.34 ± 0.05 | 0.85 ± 0.08 |

### Example 4

### Simultaneous Overexpression of AFT1 and AFT2 Increases DHAD Activity

[0355] The purpose of this example is to demonstrate that overexpression of S. cerevisiae AFT1 (Sc_AFT1) and S. cerevisiae AFT2 (Sc_AFT2) increases DHAD activity.

[0356] Standard molecular biology methods for cloning and plasmid construction were generally used, unless otherwise noted (Sambrook, J., Russel, D. W. Molecular Cloning, A Laboratory Manual. 3 ed. 2001, Cold Spring Harbor, N.Y.: Cold Spring Harbor Laboratory Press). Cloning techniques included gel purification of DNA fragments (using the Zymoclean Gel DNA Recovery Kit, Cat# D4002, Zymo Research Corp, Orange, Calif.).

[0357] S. cerevisiae Transformations: Co-transformations with the CEN and 2μ plasmids into S. cerevisiae strains are described below. Briefly, the S. cerevisiae strain GEVO2843 (Table 5) was grown on YPD medium. From the plate, the strain was re-suspended in 100 mM lithium acetate. Once the cells were re-suspended, a mixture of DNA (final volume of 15 μL with sterile water), 72 μL 50% w/v PEG, 10 μL 1 M lithium acetate, and 3 μL of denatured salmon sperm DNA (10 mg/mL) was prepared for each transformation. In a 1.5 mL tube, 15 μL of the cell suspension was added to the DNA mixture (100 μL), and the transformation suspension was vortexed for 5 short pulses. The transformation was incubated for 30 min at 30° C., followed by incubation for 22 min at 42° C. The cells were collected by centrifugation (18,000 rcf, 10 sec, 25° C.). The cells were resuspended in 1 mL YPD and after an overnight recovery shaking at 30° C. and 250 rpm, the cells were spread over YPD supplemented with 0.2 g/L G418 and 0.1 g/L hygromycin selective plates. Transformants were then single colony purified onto G418 and hygromycin selective plates.

[0358] Shake Flask Fermentation: Fermentations for the AFT1/AFT2 transformant strains were performed. Starter cultures with each transformed strain were inoculated into 3 mL YPD with 0.1 g/L hygromycin, 0.2 g/L G418, 1% v/v EtOH and incubated shaking at 250 rpm at 30° C. Pre-cultures for the fermentations were inoculated to 0.05 OD₆₀₀ into 50 mL YPD (8% w/v glucose) with 200 mM MES, 0.1 g/L hygromycin, 0.2 g/L G418, 1% v/v stock solution of 3 g/L ergosterol and 132 g/L Tween 80 dissolved in ethanol, and 20 μM CuSO₄ at pH 6.5 in 250 mL baffled flasks, shaking at 250 rpm at 30° C. Fermentation cultures were inoculated to 4.0-5.0 OD₆₀₀ into 50 mL YPD (8% w/v glucose) with 200 mM MES, 0.1 g/L hygromycin, 0.2 g/L G418, 1% v/v stock solution of 3 g/L ergosterol and 132 g/L Tween 80 dissolved in ethanol, and 20 μM CuSO₄ at pH 6.5 in 250 mL unbaffled flasks, shaking at 75 rpm at 30° C. All cultures were done in biological triplicate.

[0359] Preparation of Yeast Lysate: 50 mL of cells were spun down at 4° C., 3000 rcf for 5 min from the 72 hr timepoint of the fermentation. The medium was decanted and the cells were resuspended in 10 mL of cold MilliQ water. The cells were centrifuged a second time at 4° C., 3000 rcf for 5 min. The medium was again decanted and the cells were centrifuged at 4° C., 3000 rcf for 5 min. Remaining media was removed and the cell pellet was frozen at −80° C. Cells were thawed on ice and resuspended in lysis buffer (50 mM Tris pH 8.0, 5 mM MgSO₄) such that the result was a 20% cell suspension by mass. 1000 μL of glass beads (0.5 mm diameter) were added to a 1.5 mL microcentrifuge tube and 875 μL of cell suspension was added. Yeast cells were lysed using a Retsch MM301 mixer mill (Retsch Inc. Newtown, Pa.), mixing 6×1 min each at full speed with 1 min incubations on ice between each bead-beating step. The tubes were centrifuged for 10 min at 23,500 rcf at 4° C. and the supernatant was removed for use. The lysates were held on ice until assayed.

[0360] DHAD Assay: each sample was diluted in DHAD assay buffer (50 mM Tris pH 8, 5 mM MgSO₄) to a 1:10 and 1:100 dilution. Three samples of each lysate were assayed, along with no lysate controls. 10 μL of each sample (or DHAD assay buffer) was added to 0.2 mL PCR tubes. Using a multi-channel pipette, 90 μL of the substrate was added to each tube (substrate mix was prepared by adding 4 mL DHAD assay buffer to 0.5 mL 100 mM DHIV). Samples were put in a thermocycler (Eppendorf Mastercycler) at 35° C. for 30 min followed by a 5 min incubation at 95° C. Samples were cooled to 4° C. on the thermocycler, then centrifuged at 3000 rcf for 5 min. Finally, 75 μL of supernatant was transferred to new PCR tubes and submitted to analytics for analysis by Liquid Chromatography, method 2. Yeast lysate protein concentration was determined as described under General Methods.

[0361] Liquid Chromatography, method 2: DNPH reagent (4:1 of 15 mM 2,4-Dinitrophenyl Hydrazine:100 mM Citric Acid pH 3.0) was added to each sample in a 1:1 ratio. Samples were incubated for 30 min at 70° C. in a thermo-cycler (Eppendorf, Mastercycler). Analysis of keto-isovalerate and isobutyraldehyde was performed on an Agilent 1200 High Performance Liquid Chromatography system equipped with an Eclipse XDB C-18 reverse phase column (Agilent) and a C-18 reverse phase column guard (Phenomenex). Ketoisovalerate and isobutyraldehyde were detected using an Agilent 1100 UV detector (360 nm). The column temperature was 50° C. This method was isocratic with 70% acetonitrile 2.5% phosphoric acid (0.4%), 27.5% water as mobile phase. Flow was set to 3 mL/min. Injection size was 10 μL and run time was 2 min.

[0362] Results for DHAD Activity: Data is presented as specific DHAD activity (U/mg total cell lysate protein) averages from biological and technical triplicates with standard deviations. DHAD activity in GEVO2843 transformed with pGV2247 (Table 10)+pGV2196 (empty vector, Table 6) was 0.358±0.009 U/mg. DHAD activity for GEVO2843 transformed with pGV2247+pGV2626 (CEN plasmid that contains Sc_AFT1 and Sc_AFT2; Genotype: P_{TDH3}:Sc_AFT1, P_{TEF1}: empty, P_{PGK1}:Sc_AFT2, CEN ori, bla, HygroR) was 0.902±0.032 U/mg. The simultaneous overexpression of Sc_AFT1 and Sc_AFT2 increased the amount of DHAD activity in the strain.

### Example 5

### AFT1 Expression Increases DHAD Activity Independently of DHAD Protein Levels

[0363] The following example illustrates that overexpression of the AFT1 gene in Saccharomyces cerevisiae leads to increased DHAD activity independently of DHAD protein levels.

TABLE 14
Genotype of strains disclosed in Example 5.

| GEVO No. | Genotype |
|---|---|
| GEVO3882 | MATa ura3 leu2 his3 trp1 gpd1::T_{KI}_{_{—}}_{URA3} gpd2::T_{KI}_{_{—}}_{URA3} tma29::T_{KI}_{_{—}}_{URA3} |
| | pdc1::P_{PDC1}: Ll_kivD2_coSc5: P_{FBA1}: LEU2: T_{LEU2}: P_{ADH1}: Bs_alsS1_coSc: T_{CYC1}: P_{PGK1}: Ll_kivD2_coEc: |
| | P_{ENO2}: Sp_HIS5 pdc5::T_{KI}_{_{—}} _{URA3} pdc6::T_{KI}_{_{—}}_{URA3}_{_{—}}ₛₕₒᵣₜ: P_{FBA1}: KI_URA3: T_{KI}_{_{—}}_{URA3}{evolved |
| | for C2 supplement-independence, glucose tolerance and faster growth} [pGV2603] |
| GEVO3901 | MATa ura3 leu2 his3 trp1 gpd1::T_{KI}_{_{—}}_{URA3} gpd2::T_{KI}_{_{—}}_{URA3} tma29::T_{KI}_{_{—}}_{URA3} |
| | pdc1::P_{PDC1}: Ll_kivD2_coSc5: P_{FBA1}: LEU2: T_{LEU2}: P_{ADH1}: Bs_alsS1_coSc: T_{CYC1}: P_{PGK1}: Ll_kivD2_coEc: |
| | P_{ENO2}: Sp_HIS5 pdc5::T_{KI}_{_{—}}_{URA3} |
| | pdc6::P_{TDH3}: Sc_AFT1: P_{ENO2}: Ll_adhA^{RE1}: T_{KI}_{_{—}}_{URA3}_{_{—}}ₛₕₒᵣₜ: P_{FBA1}-KI_URA3: T_{KI}_{_{—}}_{URA3}{evolved for |
| | C2 supplement-independence, glucose tolerance and faster growth} [pGV2603] |

[0364] Media: Medium used was standard yeast medium (for example Sambrook, J., Russel, D. W. Molecular Cloning, A Laboratory Manual. 3rd ed. 2001, Cold Spring Harbor, N.Y.: Cold Spring Harbor Laboratory Press and Guthrie, C. and Fink, G. R. eds. Methods in Enzymology Part B: Guide to Yeast Genetics and Molecular and Cell Biology 350:3-623 (2002)). YP medium contains 1% (w/v) yeast extract, 2% (w/v) peptone. YPD is YP containing 2% (w/v) glucose.

[0365] Fermentations in benchtop fermentors: Fermentations in benchtop fermentors were performed to compare the DHAD enzyme activity and DHAD protein level of GEVO3882 (no AFT1 overexpression) to GEVO3901 (AFT1 overexpression). For these fermentations, 1 mL from thawed frozen stocks of the strains were transferred to 500 mL baffled flasks containing 80 mL of YP medium supplemented with 80 g/L glucose, 5 g/L ethanol, 0.5 g/L MgSO₄ and 0.2 g/L G418 and incubated for 24 h at 30° C. in an orbital shaker at 250 rpm. The flask culture for each strain was transferred to duplicate 2-L top drive motor fermentor vessels with a working volume of 0.9 L of YP medium supplemented with 80 g/L glucose, 5 g/L ethanol, 0.5 g/L MgSO₄ and 0.2 g/L G418 per vessel for a starting OD₆₀₀ of 0.5. Fermentors were operated at 30° C. and pH 6.0 controlled with 6N KOH and 2N H₂SO₄ in a 2-phase aerobic condition based on oxygen transfer rate (OTR). Initially, fermentors were operated at a growth phase OTR of 10 mM/h by fixed agitation of 700 rpm and an air overlay of 5 sL/h. Cultures were grown for 20 h to approximately 10-13 OD₆₀₀ then immediately switched to a production aeration OTR=0.5 mM/h by reducing agitation from 700 rpm to 300 rpm for the period of 20 h to 70.5 h.

[0366] Sample Collection: Samples from each fermentor were collected at 15.5 h, 20 h, 27 h, 48.5 h and 70.5 h to measure optical density at 600 nm (OD₆₀₀). A volume of culture equal to 150 OD600 was then collected from each fermentor at each time point using 60 mL sterile syringes via a sterile sample port on each vessel and placed on ice in 500 mL centrifuge bottles. The samples were centrifuged at 4000 rcf for 10 min at 4° C. to pellet the cells. The cell pellets were then separately resuspended in 60 mL cold deionized water for DHAD enzyme assays or cold deionized water containing Yeast/Fungal Protease Arrest (GBiosciences) for DHAD protein quantification and separated into 10 mL aliquots which were centrifuged at 4000 rcf for 10 min at 4° C. to pellet the cells. The supernatant was removed from each pellet and the resulting cell pellets were stored frozen at −80° C. until used to prepare cell lysates.

[0367] Cell Lysate Production: Cell lysates were prepared for each frozen sample pellet in lysis buffer U1, which contains 0.1 M sodium phosphate, pH 7.0, 5 mM MgCl₂ and 1 mM DTT, for DHAD enzyme assays or lysis buffer U1 containing Yeast/Fungal Protease Arrest (GBiosciences) for DHAD protein quantification. Each cell pellet was individually suspended to 20% (w/v) in the appropriate lysis buffer and 1 mL of that cell suspension was added together with 1000 μL of 0.5 mm diameter glass beads to a 1.5 mL microcentrifuge tube. The yeast cells were lysed using a Retsch MM301 mixer mill (Retsch Inc., Newtown, Pa.) by mixing for six 1-min cycles at full speed with 1-min incubations on ice between each cycle. The tubes were then centrifuged for 10 min at 23,500 rcf at 4° C. and the supernatant was removed. Samples for DHAD enzyme assays were held on ice until assayed on the same day and samples for DHAD protein quantification were frozen at −20° C. Yeast lysate protein concentration was determined as described under General Methods.

[0368] DHAD Assay: Each cell lysate sample was diluted 1:10 in DHAD assay buffer (50 mM Tris, pH 8, 5 mM MgSO₄). Three samples of diluted lysate were assayed, along with three controls of DHAD assay buffer containing no lysate. 10 μL of each sample or control was added to 0.2 mL PCR tubes. Using a multi-channel pipette, 90 μL of substrate mix, prepared by adding 4 mL DHAD assay buffer to 0.5 mL 100 mM DHIV, was added to each tube. These tubes were placed in an Eppendorf Mastercycler thermocycler and incubated at 35° C. for 30 min followed by incubation at 95° C. for 5 min then cooled to 4° C. in the thermocycler and centrifuged at 3000 rcf for 5 min. 75 μL of supernatant from each tube was transferred to separate new PCR tubes and submitted for liquid chromatography analysis for keto-isovalerate quantification. The DHAD activity was calculated as μmol KIV produced/min/mg total cell lysate protein in the assay.

[0369] Liquid Chromatography for Keto-Isovalerate Quantification: 100 μL of DNPH reagent, containing 12 mM 2,4-dinitrophenyl hydrazine, 10 mM citric acid, pH 3.0, 80% Acetonitrile and 20% MilliQ H₂O, was added to 100 μL of each sample. The mixtures were then incubated for 30 min at 70° C. in an Eppendorf Mastercycler thermocycler. Analysis of keto-isovalerate (KIV) was performed on an HP-1200 High Performance Liquid Chromatography system equipped with an Eclipse XDB C-18 reverse phase column (Agilent) and a C-18 reverse phase column guard (Phenomenex). Keto-isovalerate (KIV) was detected using an HP-1100 UV detector at 210 nm. The column temperature was 50° C. This method was isocratic with 70% acetonitrile to water as mobile phase with 2.5% dilute phosphoric acid (4%). Flow was set to 3 mL/min. Injection size was 10 μL and the run time was 2 min.

[0370] DHAD Protein Quantification: Cell lysate samples were prepared for gel electrophoresis by mixing with appropriate volumes of 4×LDS loading buffer (Invitrogen) and 10× reducing agent solution (Invitrogen) and MilliQ water, followed by incubation at 70° C. for 10 min. Prepared samples were run on 4-12% acrylamide Bis-Tris gels (Invitrogen) at 200V for 55 min on the Novex Gel Midi System (Invitrogen) and protein was subsequently transferred from the gel to PVDF membrane with the Novex Semi-Dry Blotter (Invitrogen). Gel electrophoresis and protein transfer were performed according to the manufacturer's recommendations. PVDF membranes with transferred proteins were blocked in 2% ECL Advance Blocking Agent (GE Healthcare) diluted in filtered TBST (150 mM NaCl, 10 mM Tris-HCl, pH 7.5, 0.5% v/v Tween 20) for 1 h at room temperature under mild agitation. Membranes were then probed with a 1:500 dilution of rabbit anti-Ll_IlvD or a 1:500 dilution of rabbit anti-Sc_Ilv3 serum for 1 h at room temperature under mild agitation. Membranes were washed with filtered TBST for 15 min, followed by three 5 min washes with additional filtered TBST. Membranes were then incubated with a 1:5000 dilution of goat anti-rabbit AlexaFluor 633-tagged secondary antibody (Invitrogen) for 1 h at room temperature under mild agitation while protected from light. Membranes were washed with TBST as described above while protected from light and then were dried and scanned on a Storm 860 fluorescence imaging system (Molecular Dynamics) using the 635 nm laser at 300V and 100 μm resolution. ImageQuant software (GE Healthcare) was used to perform standardized densitometry to quantify relative levels of protein expression, reported as integrated band intensity from the blots.

[0371] Overexpression of AFT1 Increases DHAD Activity Without Increasing DHAD Protein Levels: DHAD enzyme activity and DHAD protein levels from benchtop fermentor fermentations are summarized in Tables 15 and 16. AFT1-overexpressing strain GEVO3901 contains at least 1.5-fold higher DHAD enzyme activity at all fermentation sample time points compared with strain GEVO3882 with no AFT1 overexpression (Table 15). The ratio of DHAD enzyme activity in GEVO3901 overexpressing AFT1 compared to DHAD enzyme activity in strain GEVO3882 with no AFT1 overexpression was higher during the growth phase of the fermentation (3.7 at 15.5 h, 3.8 at 20 h) than during the production phase of the fermentation (2.8 at 27 h, 1.5 at 48.5 h and 1.8 at 70.5 h).

[0372] DHAD protein levels from AFT1-overexpressing strain GEVO3901 were not substantially different from strain GEVO3882 with no AFT1 overexpression at any of the fermentation sample time points (Table 16). Neither the Ll_IlvD nor the Sc_Ilv3 DHAD protein levels were substantially different from GEVO3901 overexpressing AFT1 compared with GEVO3882 without AFT1 overexpression at any fermentation sample time point.

TABLE 15
DHAD enzyme activity results from fermentation samples demonstrating
increased DHAD activity with AFT1 overexpression.

| | DHAD Enzyme Activity (μmol KIV/min/mg lysate protein) | |
|---|---|---|
| Time of | No AFT1 Overexpression | AFT1 Overexpression |
| Sample | (GEVO3882) | (GEVO3901) |
| 15.5 h | 0.060 ± 0.007 | 0.224 ± 0.009 |
| 20.5 h | 0.076 ± 0.003 | 0.286 ± 0.064 |
| 27 h | 0.119 ± 0.049 | 0.338 ± 0.020 |
| 48.5 h | 0.262 ± 0.026 | 0.386 ± 0.078 |
| 70.5 h | 0.367 ± 0.021 | 0.652 ± 0.083 |

TABLE 16
DHAD protein level determinations from fermentation
samples demonstrating no increase in DHAD protein
levels with AFT1 overexpression

| | Ll_IlvD DHAD Protein Level | | Sc_Ilv3 DHAD Protein Level | |
|---|---|---|---|---|
| | (Integrated Band Intensity) | | (Integrated Band intensity) | |
| | No AFT1 | AFT1 | No AFT1 | AFT1 |
| Time of | Over- | Over- | Over- | Over- |
| Sample | expression | expression | expression | expression |
| 15.5 h | 11941 ± 870 | 11144 ± 821 | 206 ± 47 | 227 ± 20 |
| 20.5 h | 10339 ± 830 | 10634 ± 749 | 225 ± 108 | 260 ± 52 |
| 27 h | 10057 ± 636 | 10065 ± 816 | 256 ± 37 | 244 ± 74 |
| 48.5 h | 9803 ± 114 | 9956 ± 273 | 158 ± 6 | 180 ± 41 |
| 70.5 h | 10010 ± 341 | 11212 ± 1922 | 181 ± 15 | 268 ± 25 |

### Example 6

### Mutating Sc AFT1 or Sc AFT2 to Sc AFT1^{UP} or Sc AFT2^{UP} Alleles

[0373] A point mutation in Sc_Aft1 and Sc_Aft2 causes derepression of transcriptional activation in the presence of iron. Sc_Aft1-1^{UP} mutation changes Cys291Phe (Yamaguchi-Iwia et al. 1995 EMBO Journal 14: 1231-9). The Sc_Aft2-1^{UP} mutation changes Cys187Phe (Rutherford et al. 2001 PNAS 98: 14322-7). The purpose of this example is to demonstrate that mutating the endogenous copy of Sc_AFT1 or Sc_AFT2 into the Sc_AFT1-1^{up} or Sc_AFT2-1^{up} mutant alleles generally mimics the overexpression of Sc_AFT1 or Sc_AFT2 by increasing DHAD activity and isobutanol titers in yeast strains carrying an isobutanol producing metabolic pathway.

[0374] In this example, Sc_AFT1 and Sc_AFT2 are replaced in the genome by Sc_AFT1-1^{UP} and Sc_AFT2-1^{UP} alleles, either individually or together. FIG. 4 and FIG. 5 show the constructs for the allelic replacement for Sc_AFT1-1^{UP} (SEQ ID NO: 62) and Sc_AFT2-1^{UP} (SEQ ID NO: 63). These constructs are synthesized by DNA2.0. The constructs are transformed into GEVO2843 (Table 5) either with pGV2227 (Table 6) or pGV2196 (empty vector control, Table 6) to yield GEVO6209 and GEVO6210 (Table 17).

[0375] Yeast Transformations: Transformations of either the linear Sc_AFT1-1^{UP} or the Sc_AFT2-1^{UP} constructs or pGV2227 (or pGV2196) into GEVO2483 are described below. Briefly, the S. cerevisiae strain GEVO2843 is grown on YPD medium. The strain is re-suspended in 100 mM lithium acetate. Once the cells are re-suspended, a mixture of DNA (final volume of 15 μL with sterile water), 72 μL 50% w/v PEG, 10 μL 1 M lithium acetate, and 3 μL of denatured salmon sperm DNA (10 mg/mL) is prepared for each transformation. In a 1.5 mL tube, 15 μL of the cell suspension is added to the DNA mixture (100 μL), and the transformation suspension is vortexed for 5 short pulses. The transformation is incubated for 30 min at 30° C., followed by incubation for 22 min at 42° C. The cells are collected by centrifugation (18,000 rcf, 10 sec, 25° C.). The cells are resuspended in 1 mL YPD and after an overnight recovery shaking at 30° C. and 250 rpm, the transformants are spread over YPD supplemented with 0.2 g/L G418 selective plates. Transformants are then single colony purified onto G418 selective plates. GEVO2483 containing pGV2227 or pGV2196 and transformed with the linear AFT^{UP} constructs are plated onto YPD with 0.2 g/L G418 and 0.1 g/L hygromycin.

TABLE 17
Genotype of strains disclosed in Example 6.

| GEVO Number | Genotype |
|---|---|
| GEVO6209 | S. cerevisiae CEN.PK2, MATa ura3 leu2 his3 trp1 |
| | pdc1Δ::P_{CUP1}: [Bs_alsS1_coSc: T_{CYC1}: P_{PGK1}: Ll_kivD2_coEc: P_{ENO2}: |
| | Sp_HIS5] pdc5Δ::[LEU2: bla: P_{TEF1}: ILV3ΔN20: P_{TDH3}: Ec_ilvC_coSc^{Q110V}] |
| | pdc6Δ::[URA3: bla; P_{TEF1}: Ll_kivD2_coEC: P_{TDH3}: Dm_ADH] |
| | aft1 Δ::[P_{AFT1}: AFT1-1^{UP}: P_{ENO2}: G418] |
| | {evolved for C2 supplement-independence, glucose tolerance and faster |
| | growth}. |
| GEVO6210 | S. cerevisiae CEN.PK2, MATa ura3 leu2 his3 trp1 |
| | pdc1Δ::P_{CUP1}: [Bs_alsS1_coSc: T_{CYC1}: P_{PGK1}: Ll_kivD2_coEc: P_{ENO2}: |
| | Sp_HIS5] pdc5Δ::[LEU2: bla: P_{TEF1}: ILV3ΔN20: P_{TDH3}: Ec_ilvC_coSc^{Q110V}] |
| | pdc6Δ::[URA3: bla; P_{TEF1}: Ll_kivD2_coEC: P_{TDH3}: Dm_ADH] aft2 |
| | Δ::[P_{AFT2}: AFT2-1^{UP}: P_{ENO2}: G418] |
| | {evolved for C2 supplement-independence, glucose tolerance and faster |
| | growth} |

[0376] Strains that grow on 0.2 g/L G418 and 0.1 g/L hygromycin are further screened by PCR to determine if the integration has replaced Sc_AFT1 or Sc_AFT2.

[0377] For AFT1: The primer AFT1UP forward (SEQ ID NO: 64) is used with the primer pENO2R (SEQ ID NO: 65) to yield a 599 base pair product that will not be present in the parental strain. The primer AFT1UP forward is used with primer AFT1termR (SEQ ID NO: 66) to ensure that the parental Sc_AFT1 does not remain in the strain. If integrated correctly, these primers give an approximately 2210 base pair product; if the parental Sc_AFT1 remains in the strain the product size is 584 base pairs. Finally, the Sc_AFT1-1^{UP} gene is amplified using the AFT1UPfullF (SEQ ID NO: 67) and pENO2R primers. This product is submitted for sequencing using the AFT1UPsequence1 (SEQ ID NO: 68) and AFT1UPsequence2 (SEQ ID NO: 69) primers to ensure that the proper mutation is in the genome.

[0378] For AFT2: Primer AFT2Upforward (SEQ ID NO: 70) is used with primer pENO2R to yield an approximately 350 base pair product that will not be present in the parental strain. Primer AFT2UP forward is used with primer AFT2termR (SEQ ID NO: 71) to ensure that the parental Sc_AFT2 does not remain in the strain. If integrated correctly these primers give an approximately 1819 base pair product. If the parental Sc_AFT2 remains in the strain the product size is 195 base pairs. Finally, the Sc_AFT2-1^{UP} gene is amplified using the AFT2UPfullF (SEQ ID NO: 72) and pENO2R primers. This product is submitted for sequencing using the AFT2UPsequence1 (SEQ ID NO: 73) and AFT2UPsequence2 (SEQ ID NO: 74) primers to ensure that the proper mutation is in the genome.

[0379] Preparation of Yeast Cells: Yeast strains are grown in 50 mL YPD with 0.2 g/L G418 (if carrying the AFT^{UP} allele) to mid-log phase (1-3 OD₆₀₀). A volume of cells so that 20 OD₆₀₀ of cells are acquired are spun down at 4° C., 3000 rcf for 5 min. The medium is decanted and the cells are resuspended in 10 mL of cold MilliQ water. The cells are centrifuged a second time at 4° C., 3000 rcf for 5 min. The medium is again decanted and the cells are centrifuged at 4° C., 3000 rcf for 5 min. The remaining medium is removed and the cell pellet is frozen at −80° C.

[0380] DHAD Assays are performed as described in the general methods section. Yeast lysate protein concentration was determined as described in the general methods section.

[0381] Gas Chromatography, Liquid chromatography method 1 and liquid chromatography method 2 are performed as described in the general methods section.

[0382] Shake-Flask Fermentation: Fermentations for the AFT1-1^{UP} and AFT2-1^{UP} transformant strains are performed. Starter cultures with each transformed strain are inoculated into 3 mL YPD with 0.2 g/L G418 and 1% v/v EtOH and incubated shaking at 250 rpm at 30° C. Pre-cultures for the fermentations are inoculated to 0.05 OD₆₀₀ into 50 mL YPD (8% w/v glucose) with 200 mM MES, 0.2 g/L G418, 1% v/v stock solution of 3 g/L ergosterol and 132 g/L Tween 80 dissolved in ethanol, and 20 μM CuSO₄ at pH 6.5 in 250 mL baffled flasks, shaking at 250 rpm at 30° C. Fermentation cultures are inoculated to 5.0 OD₆₀₀ into 50 mL YPD (8% w/v glucose) with 200 mM MES, 0.2 g/L G418, 1% v/v stock solution of 3 g/L ergosterol and 132 g/L Tween 80 dissolved in ethanol, and 20 μM CuSO₄ at pH 6.5 in 250 mL unbaffled flasks, shaking at 75 rpm at 30° C. All cultures are done in biological triplicate. Samples are collected at 24, 48 and 72 h and analyzed using the liquid chromatography, method 1, and gas chromatography protocols.

[0383] Results for DHAD activity: Data is presented as specific DHAD activity (U/mg total cell lysate protein) averages from biological and technical triplicates with standard deviations. DHAD activity in GEVO2843 transformed with pGV2227 is generally expected to be lower than that of GEVO2843+pGV2227 transformed with either the Sc_AFT1-1^{UP} or Sc_AFT2-1^{UP} allele.

[0384] Results for Isobutanol Fermentation: Data is presented as specific isobutanol titer (g/L/O_{D600}); averages from biological and technical triplicates with standard deviations. Isobutanol titers in GEVO2843 transformed with pGV2227 is generally expected to be lower than that of GEVO2843+pGV2227 transformed with either the Sc_AFT1-1^{UP} or Sc_AFT2-1^{UP} allele.

### Example 7

### Overexpression of AFT1 in S. cerevisiae Carrying an Isobutanol Producing Metabolic Pathway Increases AFT Regulon Genes as Measured by mRNA

[0385] The purpose of this example is to demonstrate that overexpression of AFT1 in strains expressing an isobutanol producing metabolic pathway increases the expression of genes in the AFT regulon in fermentation vessels. This in turn increases DHAD activity and isobutanol titer, productivity, and yield.

[0386] Media: Medium used was standard yeast medium (for example Sambrook, J., Russel, D. W. Molecular Cloning, A Laboratory Manual. 3rd ed. 2001, Cold Spring Harbor, N.Y.: Cold Spring Harbor Laboratory Press and Guthrie, C. and Fink, G. R. eds. Methods in Enzymology Part B: Guide to Yeast Genetics and Molecular and Cell Biology 350:3-623 (2002)). YP medium contains 1% (w/v) yeast extract, 2% (w/v) peptone. YPD is YP containing 2% (w/v) glucose. Medium used for the fermentation was YP with 80 g/L glucose, 0.2 g/L G418, 0.1 g/L hygromycin, 100 μM CuSO₄.5H₂O and 1% v/v ethanol. The medium was filter sterilized using a 1 L bottle top Corning PES 0.22 μm filter (431174). Medium was pH adjusted to 6.0 in the fermenter vessels using 6N KOH.

[0387] Fermentation vessel preparation and operating conditions: Batch fermentations were conducted using six 2 L top drive motor DasGip vessels with a working volume of 0.9 L per vessel. Vessels were sterilized, along with the appropriate dissolved oxygen probes and pH probes, for 60 min at 121° C. pH probes were calibrated prior to sterilization, however, dissolved oxygen probes were calibrated post sterilization in order to allow for polarization.

[0388] Process control parameters: Initial volume, 900 mL. Temperature, 30° C. pH 6.0, pH was controlled using 6N KOH and 2N H₂SO₄ (Table 20).

TABLE 18
Process Control Parameters.

| Growth phase | Oxygen transfer rate | 10 | mM/h |
|---|---|---|---|
| | Air overlay | 5.0 | slph |
| | Agitation | 700 | rpm |
| | Dissolved oxygen | Not controlled | |
| Fermentation phase | Oxygen transfer rate | 0.5 mM/h to 1.8 mM/h* | |
| | Air overlay | 5.0 | slph |

| | |
|---|---|
| Agitation | 300 rpm/400 rpm* |
| Dissolved oxygen | Not controlled |

*Oxygen transfer rate increased from 0.5 mM/h to 1.8 mM/h by increase in agitation from 300 rpm to 400 rpm 56 h post inoculation

[0389] Fermentation: The fermentation was run for 119 h. Vessels were sampled 3 times daily. Sterile 5 mL syringes were used to collect 3 mL of fermenter culture via a sterile sample port. The sample was placed in a 2 mL microfuge tube and a portion was used to measure cell density (OD₆₀₀) on a Genesys 10 spectrophotometer (Thermo Scientific). An additional 2 mL portion was taken in the same manner as described above, for use in qRT-PCR analysis. This sample was spun in a microcentrifuge for 1 min at 14,000 rpm.

[0390] Yeast Transformations: Co-transformations with the CEN and 2μ plasmids are described below. Briefly, the S. cerevisiae strain GEVO2843 (Table 5) was grown on YPD medium. The strain was re-suspended in 100 mM lithium acetate. Once the cells were re-suspended, a mixture of DNA (final volume of 15 μL with sterile water), 72 μL 50% w/v PEG, 10 μL 1 M lithium acetate, and 3 μL of denatured salmon sperm DNA (10 mg/mL) was prepared for each transformation. In a 1.5 mL tube, 15 μL of the cell suspension was added to the DNA mixture (100 μL), and the transformation suspension was vortexed for 5 short pulses. The transformation was incubated for 30 min at 30° C., followed by incubation for 22 min at 42° C. The cells were collected by centrifugation (18,000 rcf, 10 sec, 25° C.). The cells were resuspended in 1 mL YPD and after an overnight recovery shaking at 30° C. and 250 rpm, the cells were spread over YPD supplemented with 0.2 g/L G418 and 0.1 g/L hygromycin selective plates. Transformants were then single colony purified onto G418 and hygromycin selective plates.

[0391] RNA preparation: RNA was isolated using the YeaStar RNAKit™ (Zymo Research Corp. Orange, Calif.). Cells were resuspended in 80 μl of YR Digestion Buffer, 1 μl RNAsin (Promega, Madison, Wis.) and 5 μl of Zymolyase™ (provided with YeaStar RNAKit). The pellet was completely resuspended by repeated pipetting. The suspension was incubated at 37° C. for 60 min. Following the incubation, 160 μl of YR Lysis Buffer was added to the suspension, which was then mixed thoroughly by vortexing. The mixture was centrifuged at 7,000 g for 2 min in a microcentrifuge, and the supernatant was transferred to a Zymo-Spin Column in a collection tube. The column was centrifuged at 10,000 g for 1 min in a microcentrifuge. To the column, 200 μl RNA Wash Buffer was added, and the column was centrifuged for 1 min at full speed in a microcentrifuge. The flow-through was discarded and 200 μl RNA Wash Buffer was added to the column. The column was centrifuged for 1 min at 14,000 g in a microcentrifuge. The Zymo-Spin Column was transferred to a new RNase-free 1.5 mL centrifuge tube, and 60 μl of DNase/RNase-free water was added directly to the column membrane and let stand for 1 min at room temperature. The RNA was eluted by centrifugation for 1 min at full speed in the microcentrifuge. Concentrations were determined by measuring the OD₂₆₀ with the NanoDrop spectrophotometer (Thermo Scientific, Waltham, Mass. 02454). RNA was stored at −80° C. until use.

[0392] qRT-PCR analysis: RNA prepared from the fermentation samples (at a dilution of 5 ng/μl) was used as a template for one-step quantitative RT-PCR using the qScript One-Step SYBR Green qRT-PCR kit (Quanta Biosciences™ Gaithersburg, Md.). Each PCR reaction contained 10 ng of RNA, 0.5 μL of 10 μM forward primer, 0.5 μL of 10 μM reverse primer, 6.1 μL of sterile water, and 10 μL of the One-Step SYBR Green Master Mix, 0.5 μL RNAsin, and 0.4 μL of qScript One-Step Reverse Transcriptase. qRT-PCR was done in triplicate for each sample. For the purpose of normalizing the experimental samples, qRT-PCR was also done for the TFC1 housekeeping gene. Primers used to target the AFT regulon genes and for the TFC1 gene are presented in Table 19. The reactions were incubated in an Eppendorf Mastercycler ep thermocycler (Eppendorf, Hamburg, Germany) using the following conditions: 50° C. for 10 min, 95° C. for 5 min, 40 cycles of 95° C. for 15 sec and 60° C. for 45 sec (amplification), then 95° C. for 15 sec, 60° C. for 15 sec, and a 20 min slow ramping up of the temperature until it reaches 95° C. (melting curve analysis). The fluorescence emitted by the SYBR dye was measured at the 60° C. incubation step during each of the 40 cycles, as well as during the ramping up to 95° C. for melting curve analysis of the PCR product.

TABLE 19
Primers used for qRT-PCR analysis to target
the AFT regulon.

| Target | Primer | Sequence |
|---|---|---|
| TFC1 | 2649 | TCCAGGCGGTATTGACAGCAGG |
| | | (SEQ ID NO: 75) |
| | 2650 | CAATCTGCAACATCAGGTACCACGG |
| | | (SEQ ID NO: 76) |
| AFT1 | 2962 | ACGCCAACATCTTCGCAACACTC |
| | | (SEQ ID NO: 77) |
| | 2963 | TGCCGGCAGTGGCAAGATTTC |
| | | (SEQ ID NO: 78) |
| AFT2 | 2966 | CCTCTTCAAGATCCCATGCATGTCC |
| | | (SEQ ID NO: 79) |
| | 2967 | TGTAACCGCACAGAGTAGGCTGC |
| | | (SEQ ID NO: 80) |
| FET3 | 2972 | TGGCCACTGAAGGTAACGCCG |
| | | (SEQ ID NO: 81) |
| | 2973 | CCGGTAGGAATGAAGGCATGCTG |
| | | (SEQ ID NO: 82) |
| ENB1 | 2976 | TGGCGCTGAGATTGTGGTCGG |
| | | (SEQ ID NO: 83) |
| | 2977 | TGAAGCGTGCACTAGCGTCC |
| | | (SEQ ID NO: 84) |
| SMF3 | 2978 | TGCCGGGCAAATCGTTTCTGAG |
| | | (SEQ ID NO: 85) |
| | 2979 | CTTGTGGCCCAAGGTGGTAAAGACC |
| | | (SEQ ID NO: 86) |

[0393] Standard molecular biology methods for cloning and plasmid construction were generally used, unless otherwise noted (Sambrook, J., Russel, D. W. Molecular Cloning, A Laboratory Manual. 3 ed. 2001, Cold Spring Harbor, N.Y.: Cold Spring Harbor Laboratory Press).

[0394] Cloning techniques included gel purification of DNA fragments (using the Zymoclean Gel DNA Recovery Kit, Cat# D4002, Zymo Research Corp, Orange, Calif.).

[0395] GEVO2843 (Table 5) was co-transformed with two plasmids. GEVO3342 (Table 8) has plasmids pGV2227 (Table 6) and pGV2196 (empty vector, Table 6); GEVO3343 (Table 8) has plasmids pGV2227 (Table 6) and pGV2472 (Table 6-contains Sc_AFT1).

[0396] In Table 20, the fold change data was normalized to the strain without Sc_AFT1 overexpression at 24 h. Thus, all data points for the strain without Sc_AFT1 overexpression at 24 h have been set to one. The overexpression of Sc_AFT1 in S. cerevisiae strains increased predicted Sc_AFT1 target genes, ENB1 (SEQ ID NO: 123) and FET3 (SEQ ID NO: 91). SMF3 (SEQ ID NO: 159) is predicted to be more dependent on Sc_AFT2 for expression and SMF3 had a much weaker response to the overexpression of Sc_AFT1, as can be seen in Table 20.

TABLE 20
Fold change in mRNA expression between strains
with and without Sc_AFT1 overexpressed.

| | Expression at 24 h | | Expression at 119 h | |
|---|---|---|---|---|
| qRT- | Without | With over- | Without | With over- |
| PCR | overexpression | expression | overexpression | expression |
| target | of Sc_AFT1 | of Sc_AFT1 | of Sc_AFT1 | of Sc_AFT1 |
| AFT1 | 1.00 | 16.17 | 0.83 | 7.29 |
| AFT2 | 1.00 | 1.02 | 0.86 | 0.79 |
| ENB1 | 1.00 | 18.00 | 0.83 | 7.59 |
| FET3 | 1.00 | 31.89 | 0.92 | 10.16 |
| SMF3 | 1.00 | 5.37 | 1.23 | 3.23 |

[0397] Overexpression of Sc_AFT1 increased gene expression of targeted genes in the AFT regulon. As shown in Example 1, the increased expression of Sc_AFT1 in these strains also caused increased isobutanol titers, production rates and yields and DHAD activity in fermentations. Thus, it is likely that one or more genes in the AFT regulon impacts DHAD activity and isobutanol production.

### Example 8

### Overexpression of Specific Genes in the AFT1 and AFT2 Regulons

[0398] The purpose of this example is to demonstrate that a specific gene or genes from the AFT1 or AFT2 regulon are important for an increase in DHAD activity and isobutanol production.

[0399] Standard molecular biology methods for cloning and plasmid construction are generally used, unless otherwise noted (Sambrook, J., Russel, D. W. Molecular Cloning, A Laboratory Manual. 3 ed. 2001, Cold Spring Harbor, N.Y.: Cold Spring Harbor Laboratory Press).

[0400] Media: Medium used is described in the general methods section. Cloning techniques include gel purification of DNA fragments (using the Zymoclean Gel DNA Recovery Kit, Cat# D4002, Zymo Research Corp, Orange, Calif.).

[0401] AFT1 and AFT2 regulon genes presented in Table 21 are synthesized by DNA 2.0 (Menlo Park, Calif., USA) removing any HpaI or SacI restriction sites within the genes. The synthesized AFT regulon genes are cloned behind the PGK1 promoter in pGV2196 (empty vector-Table 6) creating a series of 50 plasmids that are co-transformed with pGV2227 (Table 6) into S. cerevisiae strain GEVO2843 (Table 5). Isobutanol production from strain GEVO2843 containing pGV2227 has been shown to be limited by DHAD activity. Thus, this provides a suitable background for detecting increases in DHAD activity and subsequent increases in the production of a metabolite from a DHAD-requiring biosynthetic pathway, such as an isobutanol producing metabolic pathway.

TABLE 21
Genes in the AFT1 and AFT2 Regulon
For Screening DHAD Activity

| | Gene | Protein |
|---|---|---|
| Gene name | (SEQ ID NO) | (SEQ ID NO) |
| FIT3 | SEQ ID NO: 87 | SEQ ID NO: 88 |
| FIT1 | SEQ ID NO: 89 | SEQ ID NO: 90 |
| FET3 | SEQ ID NO: 91 | SEQ ID NO: 92 |
| FRE1 | SEQ ID NO: 93 | SEQ ID NO: 94 |
| FTR1 | SEQ ID NO: 95 | SEQ ID NO: 96 |
| FIT2 | SEQ ID NO: 97 | SEQ ID NO: 98 |
| COT1 | SEQ ID NO: 99 | SEQ ID NO: 100 |
| OYE3 | SEQ ID NO: 101 | SEQ ID NO: 102 |
| TIS11/CTH2 | SEQ ID NO: 103 | SEQ ID NO: 104 |
| VMR1 | SEQ ID NO: 105 | SEQ ID NO: 106 |
| AKR1 | SEQ ID NO: 107 | SEQ ID NO: 108 |
| BIO5 | SEQ ID NO: 109 | SEQ ID NO: 110 |
| YOR387C | SEQ ID NO: 111 | SEQ ID NO: 112 |
| YDR271C | SEQ ID NO: 113 | SEQ ID NO: 114 |
| YMR034C | SEQ ID NO: 115 | SEQ ID NO: 116 |
| FRE2 | SEQ ID NO: 117 | SEQ ID NO: 118 |
| ARN1 | SEQ ID NO: 119 | SEQ ID NO: 120 |
| ATX1 | SEQ ID NO: 121 | SEQ ID NO: 122 |
| ENB1/ARN4 | SEQ ID NO: 123 | SEQ ID NO: 124 |
| SIT1/ARN3 | SEQ ID NO: 125 | SEQ ID NO: 126 |
| ARN2 | SEQ ID NO: 127 | SEQ ID NO: 128 |
| TAF1/TAF130/TAF145 | SEQ ID NO: 129 | SEQ ID NO: 130 |
| FRE5 | SEQ ID NO: 131 | SEQ ID NO: 132 |
| FRE6 | SEQ ID NO: 133 | SEQ ID NO: 134 |
| FRE3 | SEQ ID NO: 135 | SEQ ID NO: 136 |
| BNA2 | SEQ ID NO: 137 | SEQ ID NO: 138 |
| ECM4/GTO2 | SEQ ID NO: 139 | SEQ ID NO: 140 |
| HSP26 | SEQ ID NO: 141 | SEQ ID NO: 142 |
| YAP2/CAD1 | SEQ ID NO: 143 | SEQ ID NO: 144 |
| LAP4/APE1/YSC1/API | SEQ ID NO: 145 | SEQ ID NO: 146 |
| ECL1 | SEQ ID NO: 147 | SEQ ID NO: 148 |
| OSW1 | SEQ ID NO: 149 | SEQ ID NO: 150 |
| NFT1 | SEQ ID NO: 151 | SEQ ID NO: 152 |
| YBR012C | SEQ ID NO: 153 | SEQ ID NO: 154 |
| YOL083W | SEQ ID NO: 155 | SEQ ID NO: 156 |
| ARA2 | SEQ ID NO: 157 | SEQ ID NO: 158 |
| SMF3 | SEQ ID NO: 159 | SEQ ID NO: 160 |
| MRS4 | SEQ ID NO: 161 | SEQ ID NO: 162 |
| ISU1/NUA1 | SEQ ID NO: 163 | SEQ ID NO: 164 |
| FET4 | SEQ ID NO: 165 | SEQ ID NO: 166 |
| FET5 | SEQ ID NO: 167 | SEQ ID NO: 168 |
| FTH1 | SEQ ID NO: 169 | SEQ ID NO: 170 |
| CCC2 | SEQ ID NO: 171 | SEQ ID NO: 172 |
| FRE4 | SEQ ID NO: 173 | SEQ ID NO: 174 |
| ISU2 | SEQ ID NO: 175 | SEQ ID NO: 176 |
| HMX1 | SEQ ID NO: 177 | SEQ ID NO: 178 |
| PCL5 | SEQ ID NO: 179 | SEQ ID NO: 180 |
| ICY2 | SEQ ID NO: 181 | SEQ ID NO: 182 |
| PRY1 | SEQ ID NO: 183 | SEQ ID NO: 184 |
| YDL124w | SEQ ID NO: 185 | SEQ ID NO: 186 |

[0402] Yeast Transformations are performed as described in the general methods section.

[0403] Preparation of Yeast Cells for Enzyme Assays: Yeast strains are grown in 50 mL YPD with 0.2 g/L G418 and 0.1 g/L hygromycin to mid-log phase (1-3 OD₆₀₀). A volume of cells so that 20 OD₆₀₀ of cells are acquired are spun down at 4° C., 3000 rcf for 5 min. The medium is decanted and the cells are resuspend in 10 mL of cold MilliQ water. The cells are centrifuged a second time at 4° C., 3000 rcf for 5 min. The medium is again decanted and the cells are centrifuged at 4° C., 3000 rcf for 5 min. The remaining media is removed and the cell pellet is frozen at −80° C.

[0404] Preparation of Yeast Lysate for Enzyme Assays: Cell Pellets are Thawed on ice. Y-PER Plus reagent (Thermo Scientific #78999) is added to each pellet at a ratio of 12.5 μL of reagent per one OD of cells and the cells resuspended by vortexing. The suspension is gently agitated for 20 min at room temperature. After 20 min, a volume equal to the Y-PER Plus volume of universal lysis buffer (0.1 M Sodium Phosphate, pH 7.0, 5 mM MgCl₂, 1 mM DTT) is added. The suspension is shaken for another 40 min. Samples are centrifuged at 5300 g for 10 min at room temperature. The clarified lysates are transferred to a fresh tube and kept on ice until assayed.

[0405] DHAD Assays are performed as described in the general methods section.

[0406] Yeast lysate protein concentration was determined as described in the general methods section.

[0407] Gas Chromatography, liquid chromatography method 1 and liquid chromatography method 2 are performed as described in the general methods section.

[0408] Shake-Flask Fermentation: Fermentations with the AFT regulon gene transformant strains are performed. Starter cultures with each transformed strain are inoculated into 3 mL YPD supplemented with 0.2 g/L G418 and 1% v/v EtOH and incubated shaking at 250 rpm at 30° C. Pre-cultures for the fermentations are inoculated to 0.05 OD₆₀₀ into 50 mL YPD (8% w/v glucose) with 200 mM MES, 0.2 g/L G418, 1% v/v stock solution of 3 g/L ergosterol and 132 g/L Tween 80 dissolved in ethanol, and 20 μM CuSO₄ at pH 6.5 in 250 mL baffled flasks, shaking at 250 rpm at 30° C. Fermentation cultures are inoculated to 5.0 OD₆₀₀ into 50 mL YPD (8% w/v glucose) with 200 mM MES, 0.2 g/L G418, 1% v/v stock solution of 3 g/L ergosterol and 132 g/L Tween 80 dissolved in ethanol, and 20 μM CuSO₄ at pH 6.5 in 250 mL unbaffled flasks, shaking at 75 rpm at 30° C. All cultures are done in biological triplicate. Samples are collected at 24, 48 and 72 h and analyzed using the liquid chromatography, method 1, and gas chromatography protocols.

[0409] Results for DHAD activity: Data is presented as specific DHAD activity (U/mg total cell lysate protein) averages from biological and technical triplicates with standard deviations. DHAD activity in GEVO2843 transformed with pGV2227+pGV2196 (empty vector) is generally expected to be lower than that of GEVO2843 transformed with either AFT1 or AFT2 genes. In addition, GEVO2843 transformed with pGV2227 and clones containing AFT regulon genes that are important for increasing DHAD activity will generally have similar or higher DHAD activity to GEVO2843 transformed with pGV2227 and the AFT1 or AFT2 genes.

[0410] Results for Isobutanol Fermentation: Data is presented as specific isobutanol titer (g/L/OD₆₀₀); averages from biological and technical triplicates with standard deviations. Isobutanol titers in GEVO2843 transformed with pGV2227+pGV2196 (empty vector) are generally expected to be lower than that of GEVO2843 transformed with either AFT1 or AFT2 genes. In addition, GEVO2843 transformed with pGV2227 and clones containing AFT regulon genes that are important for increasing DHAD activity will generally have similar or higher isobutanol titers to GEVO2843 transformed with pGV2227 and AFT1 or AFT2.

### Example 9

### Overexpression of the Kluyveromyces lactis AFT Increases DHAD Activity in K. lactis

[0411] The purpose of this example is to demonstrate that overexpression of AFT from K. lactis increases DHAD activity in K. lactis.

[0412] Standard molecular biology methods for cloning and plasmid construction were generally used, unless otherwise noted (Sambrook, J., Russel, D. W. Molecular Cloning, A Laboratory Manual. 3 ed. 2001, Cold Spring Harbor, N.Y.: Cold Spring Harbor Laboratory Press).

[0413] Cloning techniques included gel purification of DNA fragments (using the Zymoclean Gel DNA Recovery Kit, Cat# D4002, Zymo Research Corp, Orange, Calif.).

[0414] Strains and plasmids used in Example 9 are described in Tables 22 and 23, respectively.

TABLE 22
Genotype of strains disclosed in Example 9.

| GEVO Number | Genotype |
|---|---|
| K. lactis | MATalpha uraA1 trp1 leu2 lysA1 ade1 lac4-8 [pKD1] |
| GEVO1287 | |
| K. lactis | MATalpha uraA1 trp1 leu2 lysA1 ade1 lac4-8 [pKD1] + |
| GEVO4378 | pGV2273 |
| K. lactis | MATalpha uraA1 trp1 leu2 lysA1 ade1 lac4-8 [pKD1] + |
| GEVO6169 | pGV2273 Random integrant of KL_AFT and G418. |
| | Linear fragment from plasmid pGV2962 - cut: SalI, |
| | BglII, PfoI |

TABLE 23
Plasmids disclosed in Example 9.

| Plasmid Name | Relevant Genes/Usage | Genotype |
|---|---|---|
| pGV2273 | Plasmid pGV2273 is a 1.6 micron vector | P_{TDH3}: Ec_ilvC_coSc^{P2D1-A1} |
| | that expresses KARI, KIVD, DHAD and | P_{TEF1}: Ll_ilvD_coSc |
| | ADH, encodes hygromycin resistance. | P_{PGK1}: Ll_kivD2_coEc |
| | | P_{ENO2}: Ll_adhA |
| | | 1.6μ ori, bla, HygroR |
| pGV2796 | A CEN plasmid carrying used as a | P_{TEF1}: Ll_ilvD_coSc |
| | backbone for creating pGV2962 and | P_{TPI1}: G418 |
| | pGV2963. | P_{ENO2}: Ll_adhA^{REI} |
| | | CEN ori, bla |
| pGV2962 | A CEN plasmid carrying Ll_ilvD, Kl_AFT | P_{TEF1}: Ll_ilvD_coSc |
| | genes, and G418 resistance. The plasmid | P_{TPI1}: G418 |
| | was used to create linearization fragments | P_{ENO2}: KL_AFT |
| | for integration into K. lactis. | CEN ori, bla |

[0415] K. lactis strains: K. lactis strain GEVO1287 was transformed with pGV2273 to form GEVO4378. KL_AFT was PCR amplified from template DNA from strain GEVO4378 using primers oGV3432 (SEQ ID NO: 189) (contains KpnI) and oGV3433 (SEQ ID NO: 190) (contains AvrII). Plasmid pGV2796 and the KL_AFT PCR product were cut with KpnI and AvrII and ligated together to form plasmid pGV2962. The linear fragment containing Kl_AFT:G418 was obtained by the restriction digest of pGV2962 with restriction enzymes, SalI, BglII and PfoI. The linear Kl_AFT:G418 (SEQ ID NO: 201) fragment was randomly integrated by transformation into GEVO4378 to make GEVO6169.

[0416] Yeast transformations—K. lactis: K. lactis strain GEVO1287 or GEVO4378 was inoculated into a 3 mL YPD culture and incubated overnight at 250 rpm and 30° C. A 50 mL YPD culture in a baffled 250 mL shake flask was inoculated and shaken at 30° C. until the K. lactis strain GEVO1287 reached an OD₆₀₀ of 0.83 and K. lactis strain GEVO4378 reached an OD₆₀₀ of 0.79. Cells were made chemically competent by the following procedure. Cells were collected by centrifugation at 2700 rcf for 2 min. To wash, cells were re-suspended with 50 mL of sterile milliQ water and again centrifuged at 2700 rcf for 2 min. The wash was repeated by re-suspending cells with 25 mL sterile milliQ water, cells were collected by centrifugation at 2700 rcf for 2 min. Finally the cells were resuspend with 1 mL 100 mM lithium acetate (LiOAc) and transferred to sterile 1.5 mL microcentrifuge tube. Cells were then collected by centrifugation in microfuge (set to max speed) for 10 sec. The supernatant was removed and the cells were re-suspended with 4 times the pellet volume of 100 mM LiOAc. Once the cells were prepared, a mixture of DNA (approximately 1 ug for linear DNA fragment and about 500 ng of plasmid DNA, was brought to 15 μL with sterile water), 72 μL 50% w/v PEG, 10 μL 1 M lithium acetate, and 3 μL of denatured salmon sperm DNA (10 mg/mL) was prepared for each transformation. In a 1.5 mL tube, 15 μL of the cell suspension was added to the DNA mixture (100 μL), and the transformation suspension was vortexed for 5 short pulses. The transformation was incubated for 30 min at 30° C., followed by incubation for 22 min at 42° C. The cells were collected by centrifugation (18,000 rcf, 10 sec, 25° C.). The cells were resuspended in 1 mL YPD and, after an overnight recovery shaking at 30° C. and 250 rpm, 200 μL of the GEVO1287 transformation was spread over YPD supplemented with 0.1 g/L hygromycin. 200 μL of the GEVO4378 transformation was spread over YPD supplemented with 0.1 g/L hygromycin and 0.2 g/L G418. Transformants were selected at 30° C. Transformants were then single colony purified onto either hygromycin and G418 or hygromycin selective plates.

[0417] Preparation of Yeast Lysate: K. lactis strains GEVO4378 and GEVO6169 were inoculated into 3 mL of YPD with 0.1 g/L hygromycin and incubated at 30° C. at 250 rpm overnight culture. After approximately 18 h a 50 mL YPD or YPD+0.1 g/L hygromycin culture in a baffled 250 mL shake flask was inoculated and shaken at 250 rpm until the culture reached approximately 2-3 OD₆₀₀. 20 OD₆₀₀ of cells were harvested in 15 mL Falcon tubes and centrifuged at 4° C., 3000 rcf for 5 min. The medium was decanted and the cells were re-suspended in 2 mL of ice-cold MilliQ water. The cells were centrifuged a second time at 4° C., 3000 rcf for 5 min. The supernatant was again decanted, and the cells were centrifuged at 4° C., 3000 rcf for 5 min. The remaining medium was removed. The cell pellet was frozen at −80° C. The cell pellets were thawed on ice and 750 μL of lysis buffer (0.1 M Sodium Phosphate, pH 7.0, 5 mM MgCl₂, 1 mM DTT) was used to re-suspend each pellet. 800 μL of re-suspended cell pellet was added to a 1.5 mL centrifuge tube with 1 mL of 0.5 mm glass beads. The tubes containing the glass beads and cell suspension were put into the two bead beater blocks chilled to −20° C. The Retsch MM301 bead beater was set to 1 min and 300 1/sec frequency. To lyse the cells, the cell suspensions were beat 6 times for 1 min each, with 2 min of cooling the tubes and the bead beater blocks on ice in between beatings. After bead beating, the tubes were centrifuged at 4° C. at 21,500 g for 10 min in a tabletop centrifuge. The supernatant was transferred into 1.5 mL tubes and placed on ice for use in the DHAD assay. Yeast lysate protein concentration was determined as described under General Methods.

[0418] DHAD Assay: The assay was performed in triplicate for each sample. In addition, a no lysate control with lysis buffer was included. To assay each sample, 10 μL of a 1:10 dilution of lysate in lysis buffer (0.1 M Sodium Phosphate, pH 7.0, 5 mM MgCl₂, 1 mM DTT) was mixed with 90 μL of assay buffer (5 μL of 0.1 M MgSO₄, 10 μL of 0.1 M DHIV, and 75 μL 50 mM Tris pH 7.5), and incubated in a thermocycler for 30 min at 30° C., then at 95° C. for 5 min. Insoluble material was removed from the samples by centrifugation at 3000 rcf for 5 min. The supernatants are transferred to fresh PCR tubes and submitted to analytics for analysis by liquid chromatography, method 2.

[0419] Liquid Chromatography, Method 2: DNPH reagent (4:1 of 15 mM 2,4-Dinitrophenyl Hydrazine:100 mM Citric Acid pH 3.0) was added to each sample in a 1:1 ratio. Samples were incubated for 30 min at 70° C. in a thermo-cycler (Eppendorf, Mastercycler). Analysis of keto-isovalerate was performed on an Agilent 1200 High Performance Liquid Chromatography system equipped with an Eclipse XDB C-18 reverse phase column (Agilent) and a C-18 reverse phase column guard (Phenomenex). Ketoisovalerate were detected using an Agilent 1100 UV detector (360 nm). The column temperature was 50° C. This method was isocratic with 70% acetonitrile 2.5% phosphoric acid (0.4%), 27.5% water as mobile phase. Flow was set to 3 mL/min. Injection size was 10 μL and run time was 2 min.

[0420] DHAD Assay Results: The in vitro DHAD enzymatic activity of lysates from the microaerobic fermentation of K. lactis strains was determined as described above. All values are the specific DHAD activity (U/mg total cell lysate protein) as averages from technical triplicates. In K. lactis, overexpression of the Kl_AFT gene resulted in an increase in DHAD activity (U/mg total cell lysate protein). GEVO4378 without Kl_AFT overexpression had an activity of 0.053±0.009 U/mg while GEVO6169, overexpressing Kl_AFT had a specific activity of 0.131±0.012 U/mg.

### Example 10

### Overexpression of the Kluyveromyces marxianus AFT

[0421] The purpose of this example is to demonstrate that overexpression of K. marxianus AFT (Km_AFT) is generally expected to increase DHAD activity in K. marxianus.

[0422] Standard molecular biology methods for cloning and plasmid construction are generally used, unless otherwise noted (Sambrook, J., Russel, D. W. Molecular Cloning, A Laboratory Manual. 3 ed. 2001, Cold Spring Harbor, N.Y.: Cold Spring Harbor Laboratory Press). Cloning techniques include gel purification of DNA fragments (using the Zymoclean Gel DNA Recovery Kit, Cat# D4002, Zymo Research Corp, Orange, Calif.).

[0423] Strains used in Example 10 are described in Table 24.

TABLE 24
Genotype of strains disclosed in Example 10.

| GEVO Number | Genotype |
|---|---|
| K. marxianus | K. marxianus, NRRL-Y7571 |
| GEVO1068 | |
| K. marxianus | ura3Δ |
| GEVO1947 | |
| K. marxianus | ura3Δ |
| GEVO6222 | Random integration of: |
| | P_{KmPDC}: Ll_ilvD: P_{TPI}: G418: P_{PGK1}: |
| | Km_AFT: T:_{ScAFT} |
| K. marxianus | Δura3 |
| GEVO6223 | Random integration of: |
| | P_{KmPDC}: Ll_ilvD: P_{TPI}: G418: P_{PGK1} |

[0424] In this example, the K. marxianus URA3 gene was deleted by transformation of GEVO1068 with a PCR fragment (SEQ ID NO: 191) of K. marxianus URA3 carrying a deletion of 348 base pairs that was amplified from pGV1799 (SEQ ID NO: 192) using primers oGV394 (SEQ ID NO: 193) and oGV395 (SEQ ID NO: 194). The K. marxianus ura3 deletion strain transformants were selected by plating on 5-FOA (5-fluoroorotic acid) plates (For 500 mL: 10 g agar, 400 mL dH₂O, 0.5 g 5-FOA (in 5 mL DMSO), 50 mL 10×a.a (14 g yeast synthetic drop-out supplement (US Biological) dissolved in 1 L water), 3.35 g YNB, 10 g glucose, 10 mL 50×HIS (0.95 g histidine/250 mL H₂O), 10 mL 50×TRP (1.9 g in 500 mL H₂O), 10 mL 10×LEU (4.75 g Leucine/250 mL H₂O), 3.15 mL 25×URA(0.475 g uracil/250 mL H₂O). The 5-FOA resistant colonies were confirmed for the correct phenotype (auxotrophic for uracil). PCR demonstrated a partial deletion of approximately 200 bp in the ura3 gene and this strain was named GEVO1947.

[0425] A linear DNA fragment containing Km_AFT, Ll_ilvD, and a G418 resistance marker (SEQ ID NO: 195, FIG. 6) is synthesized by DNA2.0. The fragment is randomly integrated by transformation into K. marxianus strain GEVO1947 to obtain GEVO6222. A linear fragment containing Ll_ilvD and a G418 marker is also synthesized by DNA2.0 (SEQ ID NO: 196, FIG. 7) and is randomly integrated by transforming K. marxianus strain GEVO1947 to obtain GEVO6223.

[0426] Transformations are carried out as follows: K. marxianus strain GEVO1947 is incubated in 50 mL of YPD medium (1% (w/v) yeast extract, 2% (w/v) peptone, 2% (w/v) glucose) shaking at 250 RPM at 30° C. until the culture is at an OD₆₀₀ of approximately 5. The cells are collected in a sterile 50 mL conical tube by centrifugation (1600 rcf, 5 min at room temperature). The cells are then resuspended in 10 mL of electroporation buffer (10 mM Tris-HCl, 270 mM sucrose, 1 mM MgCl₂, pH 7.5), and collected at 1600 rcf for 5 min at room temperature. The cells are then resuspended in 10 mL IB (YPD medium, 25 mM DTT, 20 mM HEPES, pH 8.0; prepared fresh by diluting 100 μL of 2.5M DTT and 200 μL of 1 M HEPES, pH 8.0 into 10 mL of YPD) and are incubated for 30 min, 250 RPM, 30° C. (tube standing vertical). The cells are collected at 1600 rcf for 5 min at room temperature and resuspended in 10 mL of chilled electroporation buffer. The cells are then pelleted at 1600 rcf for 5 min at 4° C. The cells are then resuspended in 1 mL of chilled electroporation buffer and transferred to a microfuge tube. The cells are collected by centrifugation at >10,000 rcf for 20 sec at 4° C. The cells are then resuspended in an appropriate amount of chilled electroporation buffer for a final biomass concentration of 30 OD₆₀₀/mL. 400 μL of cell suspension is added to a chilled electroporation cuvette (0.4 cm gap) and 50 μL of DNA (SEQ ID NO: 195 or SEQ ID NO: 196 or water control) is added and mixed by pipetting up and down, and the cuvette is incubated on ice for 15-30 min. The samples are then electroporated at 1.8 kV, 1000 Ohm, 25 μF. The samples are transferred to a 50 mL tube with 1 mL YPD medium, and the samples are incubated for 4 h at 250 rpm at 30° C. 200 μL of each transformation culture are spread onto YPD plates containing 0.2 g/L G418 and the plates are incubated at 30° C. until individual colonies develop.

[0427] K. marxianus strain GEVO6222 is verified by colony PCR for the integration of Km_AFT using primers PGK1F (SEQ ID NO: 197) and KmAFTR (SEQ ID NO: 198) (yielding an approximately 325 base pair product) and integration of Ll_ilvD using primers oGV2107 (SEQ ID NO: 199) and oGV2108 (SEQ ID NO: 200) (yielding an approximately 104 base pair product). K. marxianus strain GEVO6223 is verified by colony PCR for the integration of Ll_ilvD using primers oGV2107 and oGV2108.

[0428] Next, K. marxianus strains GEVO1947, GEVO6222 and GEVO6223 are inoculated into 3 mL of YPD medium (1% (w/v) yeast extract, 2% (w/v) peptone, 2% (w/v) glucose) and incubated at 30° C. at 250 rpm. After approximately 18 h, a 50 mL YPD culture in a baffled 250 mL shake flask is inoculated and shaken at 250 rpm until the culture reaches approximately 2-3 OD₆₀₀. Cell pellets are prepared by taking 20 OD units of culture [OD_{600 nm}×volume (mL)=20] and centrifuging the appropriate volume at 3000 rpm and 4° C. for 5 min. The medium is decanted and the cells are resuspended in 2 mL of ice-cold MilliQ water. The cells are centrifuged a second time at 4° C., 3000 rcf for 5 min. The supernatant is again decanted, and the cells are centrifuged at 4° C., 3000 rcf for 5 min. The remaining medium is removed. The cell pellet is frozen at −80° C. To prepare lysate, the cell pellets are thawed on ice and 750 μL of lysis buffer (0.1 M Sodium Phosphate, pH 7.0, 5 mM MgCl₂, 1 mM DTT) is used to re-suspend each pellet. 800 μL of re-suspended cell pellet is added to a 1.5 mL centrifuge tube with 1 mL of 0.5 mm glass beads. The tubes containing the glass beads and cell suspension are put into the two bead beater blocks chilled to −20° C. A Retsch MM301 bead beater is set to 1 min and 300 1/sec frequency. To lyse the cells, the cell suspensions are beat 6 times for 1 min each, with 2 min of cooling the tubes and the bead beater blocks on ice in between beatings. After bead beating, the tubes are centrifuged at 4° C. at 21,500 g for 10 min in a tabletop centrifuge. The supernatant is transferred into 1.5 mL tubes and placed on ice for use in the DHAD activity assay. Yeast lysate protein concentration is determined as described under General Methods.

[0429] DHAD assays are performed as described in the general methods sectionLiquid chromatography method 2 is performed as described in the general methods section.

[0430] Results for DHAD activity: Data is presented as specific DHAD activity (U/mg total cell lysate protein) averages from biological and technical triplicates with standard deviations. DHAD activity in GEVO6223, containing DHAD is generally expected to be lower than that of GEVO6222 containing both Km_AFT and DHAD.

### Example 11

### Construction of Issatchenkia orientalis Strain with Isobutanol Pathway Genes Integrated into the Genome

[0431] The purpose of this example is to demonstrate that overexpression of Issatchenkia orientalis AFT1-2 (herein referred to as Io_AFT1-2) increases DHAD activity in I. orientalis.

[0432] An I. orientalis strain derived from PTA-6658 (US 2009/0226989) was grown overnight and transformed using the lithium acetate method as described in Gietz, et al (1992, Nucleic Acids Research 20: 1524). The strain was transformed with homologous integration constructs using native I. orientalis promoters to drive protein expression. Issatchenkia orientalis strains used are described in Table 25.

TABLE 25
Genotype of strains disclosed in Example 11.

| Strain Number | Genotype |
|---|---|
| GEVO6155 | ura3/ura3 |
| | gpd1Δ::P_{Io}_{_{—}}_{PDC}: Ll_adhA^{RE1}: T_{ScCYC1}: P_{Io}_{_{—}}_{TDH3}: Ec_ilvC^{P2D1-A1}: T_{ScGAL10}: loxP: Io_URA3: |
| | loxP: P_{Io}_{_{—}}_{ENO1}: Ll_ilvD-1/ |
| | gpd1Δ::P_{Io}_{_{—}}_{PDC}: Ll_adhA^{RE1}: T_{ScCYC1}: P_{Io}_{_{—}}_{TDH3}: Ec_ilvC^{P2D1-A1}: T_{ScGAL10}: loxP: |
| | Sc_MEL5: loxP: P_{Io}_{_{—}}_{ENO1}: Ll_ilvD-1 |
| | TMA29/tma29Δ::P_{Io}_{_{—}}_{PDC1}: Ll_adhA^{RE1}: P_{Io}_{_{—}}_{TDH3}: Ec_ilvC^{P2D1-A1}: loxP: Io_URA3: loxP: |
| | P_{Io}_{_{—}}_{ENO1}: Ll_ilvD-4 |
| GEVO6162 | ura3/ura3 |
| | gpd1Δ::P_{Io}_{_{—}}_{PDC}: Ll_adhA^{RE1}: T_{ScCYC1}: P_{Io}_{_{—}}_{TDH3}: Ec_ilvC^{P2D1-A1}: T_{ScGAL10}: loxP: Io_URA3: |
| | loxP: P_{Io}_{_{—}}_{ENO1}: Ll_ilvD-1/ |
| | gpd1Δ:: P_{Io}_{_{—}}_{PDC}: Ll_adhA^{RE1}: T_{ScCYC1}: P_{Io}_{_{—}}_{TDH3}: Ec_ilvC^{P2D1-A1}: T_{ScGAL10}: loxP: |
| | Sc_MEL5: loxP: P_{Io}_{_{—}}_{ENO1}: Ll_ilvD-1 (SEQ ID NO: 204) |
| | TMA29/tma29Δ:: P_{Io}_{_{—}}_{PDC1}: Ll_adhA^{RE1}: P_{Io}_{_{—}}_{TDH3}: Ec_ilvC^{P2D1-A1}: loxP: Io_URA3: loxP: |
| | P_{ENO1}: Ll_ilvD-4 (SEQ ID NO: 206): P_{PYK1}: Io_AFT1-2 |
| GEVO6203 | ura3/ura3 |
| | gpd1Δ::P_{Io}_{_{—}}_{PDC}: Ll_adhA^{RE1}: T_{ScCYC1}: P_{Io}_{_{—}}_{TDH3}: Ec_ilvC^{P2D1-A1}: T_{ScGAL10}: loxP: Io_URA3: |
| | loxP: P_{Io}_{_{—}}_{ENO1}: Ll_ilvD/ |
| | gpd1Δ:: P_{Io}_{_{—}}_{PDC}: Ll_adhA^{RE1}: T_{ScCYC1}: P_{Io}_{_{—}}_{TDH3}: Ec_ilvC^{P2D1-A1}: T_{ScGAL10}: loxP: |
| | Sc_MEL5: loxP: P_{Io}_{_{—}}_{ENO1}: Ll_ilvD |
| | TMA29/tma29Δ:: P_{Io}_{_{—}}_{PDC1}: Ll_adhA^{RE1}: P_{Io}_{_{—}}_{TDH3}: Ec_ilvC^{P2D1-A1}: loxP: Io_URA3: loxP: |
| | P_{ENO1}: Ll_ilvD: P_{PYK1}: Io_AFT1-2 |

[0433] Three strains were used to demonstrate that the overexpression of I. orientalis AFT1-2 increases DHAD activity in I. orientalis. GEVO6155 does not contain the heterologous AFT1-2 expression construct, while both GEVO6162 and GEVO6203 have the heterologous AFT1-2 construct integrated into the genome. All three strains were cultured in two different conditions and then tested for DHAD activity.

[0434] In the first condition, cultures were started for each strain (GEVO6155, GEVO6162, and GEVO6203) in 12 mL YP medium (1% (w/v) yeast extract, 2% (w/v) peptone) containing 5% (w/v) glucose and incubated at 30° C. and 250 RPM for 9 h. The OD₆₀₀ of the 12 mL cultures was determined and the appropriate volume of each culture was used to inoculate 50 mL of YP medium containing 8% glucose in separate 250 mL baffled flasks to an OD₆₀₀ of 0.01. The flasks were incubated at 30° C. and 250 RPM for 18 h. A total of 80 OD₆₀₀ of cells were harvested and the cell suspension was transferred to 50 mL Falcon tubes. Cells were pelleted at 3000 rcf for 5 min at 4° C., and washed twice in 2 mL cold, sterile water. The cell pellets were stored at −80° C. until analysis by DHAD assay.

[0435] In the second condition, cultures were inoculated at a starting OD₆₀₀ of 0.1 and were incubated at 30° C. with 250 rpm shaker speed for 20 h and then the shaker speed was reduced to 75 rpm for an additional 28 h prior to sampling. Cells were washed twice with cold sterile water and stored at −80° C. until analysis.

[0436] To determine DHAD activity in whole cell lysates, the frozen cell pellets were thawed on ice and resuspended in 750 μL lysis buffer (100 mM NaPO₄ pH 7.0, 5 mM MgCl₂ and 1 mM DTT). One mL of glass beads (0.5 mm diameter) were added to a 1.5 mL microcentrifuge tube and the entire cell suspension for each strain was added to separate tubes containing glass beads. Yeast cells were lysed using a Retsch MM301 bead beater (Retsch Inc. Newtown, Pa.), bead beating six times for 1 min each at full speed with 1 min icing in between each bead beating step. The tubes were centrifuged for 10 min at 23,500×g at 4° C. and the supernatant was removed. Supernatants were held on ice until assayed. Yeast lysate protein concentration was determined as described under General Methods.

[0437] DHAD assays were performed in triplicate for each sample. In addition, an assay on a no lysate control with lysis buffer was performed. To assay each sample, 10 μL of lysate in assay buffer was mixed with 90 μL of assay buffer (5 μL of 0.1 M MgSO₄, 10 μL of 0.1 M DHIV, and 75 μL 50 mM Tris pH 7.5), and incubated in a thermocycler (Eppendorf, Mastercycler) for 30 min at 30° C., then at 95° C. for 5 min. Insoluble material was removed from the samples by centrifugation at 3000 rcf for 5 min. The supernatants were transferred to fresh PCR tubes. 100 μL DNPH reagent (12 mM 2,4-dinitrophenyl hydrazine, 10 mM citric acid, pH 3.0, in 80% acetonitrile, 20% MilliQ H₂O) was added to 50 μL of each sample and 50 μL of MilliQ H₂O. Samples were incubated for 30 min at 70° C. in a thermocycler.

[0438] Analysis of keto-isovalerate (KIV) was performed on an Agilent 1200 High Performance Liquid Chromatography system equipped with an Eclipse XDB C-18 reverse phase column (Agilent) and a C-18 reverse phase column guard (Phenomenex). Ketoisovalerate was detected using an Agilent 1100 UV detector (360 nm). The column temperature was 50° C. This method was isocratic with 70% acetonitrile 2.5% phosphoric acid (0.4%), 27.5% water as mobile phase. Flow was set to 3 mL/min. Injection size was 10 μL and run time was 2 min. KIV was quantified on a 3-point linear calibration curve.

[0439] The in vitro DHAD enzymatic activity of lysates from the samples of I. orientalis strains were carried out as described above. DHAD activity (U/mg total cell lysate protein) is reported as averages from biological triplicate samples. In I. orientalis, overexpression of the I. orientalis AFT1-2 gene resulted in an increase in DHAD activity (U/mg total cell lysate protein). The cultures harvested at 18 h (samples inoculated at 0.01) had DHAD activity values as follows: GEVO6155 had an activity of 0.039±0.004 U/mg while GEVO6162 had an activity of 0.082±0.005 U/mg and GEVO6203 had an activity of 0.060±0.011 U/mg. The cultures harvested at 48 h (cultures inoculated at 0.1) had DHAD activity values as follows: GEVO6155 had an activity of 0.085±0.014 U/mg while GEVO6162 had an activity of 0.155±0.020 U/mg and GEVO6203 had an activity of 0.140±0.033 U/mg. Therefore, this example demonstrates that overexpression of Io_AFT1-2 increases DHAD activity in I. orientalis.

### Example 12

### Overexpression of Fe—S Assembly Machinery

[0440] To ascertain the effects of overexpressing a cytosolic 2Fe-2S or 4Fe-4S cluster-containing DHAD with candidate assembly machinery, the following steps, or equivalent steps can be carried out. First, the coding sequence for the open reading frame of the DHAD from spinach or other 2Fe-2S or 4Fe-4S cluster-containing DHAD is cloned into the high-copy (2 micron origin) S. cerevisiae expression vector pGV2074, such that expression of the coding sequence is directed by the PGK1 promoter sequence, yielding plasmid pGV2074-1. Next, the NifU and NifS genes from Entamoeba histolytica or the homologous NIF genes from Lactococcus lactis are successively introduced into the aforementioned vector, eventually yielding a single plasmid (pGV2074-2) where the expression of all 3 genes is directed by strong constitutive S. cerevisiae promoter sequences. Plasmids pGV2074-1 and pGV2074-2 are transformed into S. cerevisiae strain GEVO2244 (relevant genotype, ilv3Δ) and transformants selected by resistance to Hygromycin B (0.1 g/L). At least 3 individual colonies arising from each transformation are cultured, a cell lysate produced, and the DHAD activity present therein measured, all according to previously-described methods.

### Example 13

### Overexpression of NFS1 and ISD11 Increases DHAD Activity and Isobutanol Production

[0441] The purpose of this example is to demonstrate that overexpression of NFS1 and ISD11 in a recombinant yeast strain expressing an isobutanol producing metabolic pathway increases DHAD activity and isobutanol production.

[0442] In this example, NFS1 and ISD11 were cloned downstream of the TEF1 and TDH3 promoters on a plasmid, pGV2196 (FIG. 8), in single and double combinations (Table 26). These plasmids were transformed into a strain of S. cerevisiae, GEVO6014 (Table 27), which contains an isobutanol producing metabolic pathway comprising a cytosolically localized DHAD (the ilvD gene product of L. lactis). GEVO6014 was also transformed with an empty vector (pGV2196 without NFS1 and/or ISD11) as a control.

TABLE 26
Plasmids Containing Specific Promoter: Gene Combinations
Used for NFS1 and/or ISD11 Overexpression.

| Plasmid | Promoter: Gene Combinations |
|---|---|
| pGV3139 | P_{Sc}_{_{—}}_{TDH3}: Sc_NFS1 |
| pGV3140 | P_{Sc}_{_{—}}_{TEF1}: Sc_ISD11 |
| pGV3141 | P_{Sc}_{_{—}}_{TEF1}: Sc_NFS1 |
| pGV3142 | P_{Sc}_{_{—}}_{TDH3}: Sc_ISD11 |
| pGV3143 | P_{Sc}_{_{—}}_{TEF1}: Sc_ISD11 P_{Sc}_{_{—}}_{TDH3}: Sc_NFS1 |
| pGV3144 | P_{Sc}_{_{—}}_{TEF1}: Sc_NFS 1 P_{Sc}_{_{—}}_{TDH3}: Sc_ISD11 |

TABLE 27
Genotype of GEVO6014.

| GEVO Number | Genotype | Plasmid |
|---|---|---|
| GEVO6014 | Saccharomyces cerevisiae MATa ura3Δ | pGV2964 |
| | ald6::P_{PGK1}: Bs_alsS1_coSc: T_{CYC1}: P_{PGK1}: KI_URA3: T_{CYC1}: | |
| | P_{CCW12}: Ec_ilvC_coSc^{P2D1-A1-his6} | |
| | gpd2::P_{PDC1(628)}: Ll_ilvD_coSc4: P_{TDH3}: Sc_AFT1: T_{CYC1}: | |
| | loxP: P_{CCW12}: Ec_ilvC_coSc^{P2D1-A1-his6} tma29::loxP | |
| | gpd1::P_{ADH1}: Bs_alsS1_coSc: T_{CYC1}: P_{PDC1(-750)}: | |
| | Ll_kivD_coSc5: T_{GPD1} | |
| | pdc1::P_{CUP1}: Bs_alsS1_coSc: T_{CYC1}: P_{PGK1}: Ll_kivD2_coEc: | |
| | T_{KI}_{_{—}}_{URA3} pdc6::P_{TEF1}: Ll_ilvD: P_{TDH3}: Ec_ilvC_coSC^{P2D1-A1}: | |
| | P_{ENO2}: Ll_adhA | |
| | pdc5::T_{KI}_{_{—}}_{LAC4} {evolved for C2i, glucose derepression | |
| | and ~0.1 h⁻¹ growth rate in YNB50D medium} | |
| | [pGV2964] [FIG. 9] | |

[0443] Shake flask fermentations were performed with triplicate transformants for each plasmid and sampled at the switch to production (i.e., the end of the growth culture before harvesting the cells for the production phase) and at 48 h of production (the end of the fermentation) for DHAD activities and at 24 h and 48 h of production for isobutanol determination by gas chromatographic analysis and other metabolites and glucose by liquid chromatography.

[0444] The fermentation results with respect to isobutanol production are summarized in Table 28, while the results of DHAD activity assays are shown in Table 29.

TABLE 28
Fermentation Results for Isobutanol Production from GEVO6014 Containing the Indicated Plasmid.

| | | 24 h | | 48 h | | | 0 h-48 h |
|---|---|---|---|---|---|---|---|
| | | Volumetric | Specific | Volumetric | Specific | % | Volumetric |
| | Promoter: Gene | Titer | Titer | Titer | Titer | Theoretical | Productivity |
| Plasmid | Combinations | (g/L) | (g/gCDW) | (g/L) | (g/gCDW) | Yield | (g/L/h) |
| pGV3139 | P_{Sc}_{_{—}}_{TDH3}: Sc_NFS1 | 4.4 ± 0.4 | 1.4 ± 0.1 | 9.5 ± 0.5 | 2.6 ± 0.2 | 68.0 ± 0.3 | 0.20 ± 0.01 |
| pGV3140 | P_{Sc}_{_{—}}_{TEF1}: Sc_ISD11 | 4.1 ± 1.3 | 1.3 ± 0.3 | 8.6 ± 2.5 | 2.2 ± 0.6 | 66.3 ± 5.0 | 0.18 ± 0.05 |
| pGV3141 | P_{Sc}_{_{—}}_{TEF1}: Sc_NFS1 | 3.8 ± 0.4 | 1.3 ± 0.0 | 8.4 ± 1.2 | 2.2 ± 0.3 | 66.6 ± 3.2 | 0.18 ± 0.02 |
| pGV3142 | P_{Sc}_{_{—}}_{TDH3}: SC_ISD11 | 4.3 ± 0.6 | 1.4 ± 0.2 | 9.2 ± 1.1 | 2.4 ± 0.2 | 67.4 ± 2.2 | 0.19 ± 0.02 |
| pGV3143 | P_{Sc}_{_{—}}_{TEF1}: Sc_ISD11 | 7.4 ± 0.3 | 2.9 ± 0.1 | 13.4 ± 0.8 | 3.8 ± 0.2 | 71.9 ± 1.8 | 0.28 ± 0.02 |
| | P_{Sc}_{_{—}}_{TDH3}: SC_NFS1 | | | | | | |
| pGV3144 | P_{Sc}_{_{—}}_{TEF1}: Sc_NFS1 | 5.8 ± 1.4 | 2.6 ± 0.1 | 10.7 ± 3.2 | 3.4 ± 0.5 | 71.1 ± 2.9 | 0.22 ± 0.07 |
| | P_{Sc}_{_{—}}_{TDH3}: Sc_ISD11 | | | | | | |
| pGV2196 | Empty Vector | 3.7 ± 0.4 | 1.3 ± 0.0 | 8.3 ± 0.7 | 2.2 ± 0.1 | 66.0 ± 2.2 | 0.17 ± 0.02 |

TABLE 29
DHAD Activity Assay Results from GEVO6014
Containing the Indicated Plasmid.

| | | DHAD Activity (U/mg lysate protein) | |
|---|---|---|---|
| | Promoter: Gene | Switch to | |
| Plasmid | Combinations | production | 48 h |
| pGV3139 | P_{Sc}_{_{—}}_{TDH3}: Sc_NFS1 | 0.038 ± 0.003 | 0.049 ± 0.008 |
| pGV3140 | P_{Sc}_{_{—}}_{TEF1}: Sc_ISD11 | 0.046 ± 0.004 | 0.059 ± 0.019 |
| pGV3141 | P_{Sc}_{_{—}}_{TEF1}: Sc_NFS1 | 0.043 ± 0.003 | 0.049 ± 0.007 |
| pGV3142 | P_{Sc}_{_{—}}_{TDH3}: Sc_ISD11 | 0.036 ± 0.005 | 0.060 ± 0.007 |
| pGV3143 | P_{Sc}_{_{—}}_{TEF1}: Sc_ISD11 | 0.066 ± 0.005 | 0.117 ± 0.020 |
| | P_{Sc}_{_{—}}_{TDH3}: Sc_NFS1 | | |
| pGV3144 | P_{Sc}_{_{—}}_{TEF1}: Sc_NFS1 | 0.062 ± 0.13 | 0.061 ± 0.015 |
| | P_{Sc}_{_{—}}_{TDH3}: Sc_ISD11 | | |
| pGV2196 | Empty Vector | 0.037 ± 0.005 | 0.054 ± 0.006 |

[0445] FIGS. 10-15 further illustrate the fermentation results for isobutanol production. Expression of NFS1 and ISD11 together in the combination P_{TEF1}:ISD11 P_{TDH3}:NFS1 (from plasmid pGV3143) in GEVO6014 increased isobutanol volumetric titer and volumetric productivity by 62% and specific isobutanol titer by 73% over the control strain (GEVO6014 containing the empty vector pGV2196) after 48 h of production. The NFS1-ISD11 combination P_{TEF1}:NFS1 P_{TDH3}:ISD11 (from plasmid pGV3144) in GEVO6014 increased specific isobutanol titer over the control strain by 55% after 48 h of production. Expression of NFS1 and ISD11 together in the combination P_{TEF1}:ISD11 P_{TDH3}:NFS1 (from plasmid pGV3143 and pGV3144) in GEVO6014 increased isobutanol yield over the control strain (GEVO6014 containing the empty vector pGV2196) as shown in Table 28. In contrast, NFS1 or ISD11 cloned separately behind either promoter did not provide increases in titer, yield, or productivity over the control strain.

[0446] FIG. 16 illustrates the DHAD activity assay results. NFS1 and ISD11 together in the combination P_{TEF1}:NFS1 P_{TDH3}:ISD11 (from plasmid pGV3143) in GEVO6014 increased DHAD activity at both the switch to production and 48 h of production by 79% and 115%, respectively, over the control strain containing the empty vector. The combination P_{TEF1}:NFS1 P_{TDH3}:ISD11 (from plasmid pGV3144) in GEVO6014 gave a 70% increase in DHAD activity at the switch to production but no significant increase in DHAD activity at 48 h of production compared to the control strain containing the empty vector pGV2196. In contrast, NFS1 or ISD11 cloned separately behind either promoter did not provide increases in DHAD activity at either sampling time.

[0447] Conclusions from Example 13: Overexpression of NFS1 and ISD11 together increased DHAD activity in the S. cerevisiae strain, GEVO6014. Because Nfs1 and Isd11 are mitochondrially-localized proteins in yeast and overexpression of NFS1 and ISD11 demonstrated an increase in DHAD activity in GEVO6014, some of the activity increase may have been due to an increase in activity of the mitochondrially-localized yeast Ilv3 DHAD protein. Accordingly, it appears that overexpression of NFS1 and ISD11 in yeast biocatalysts can be used to increase the activity of mitochondrially-localized FeS proteins by increased flux through the FeS cluster biogenesis pathway, especially if overexpression of mitochondrially-targeted FeS proteins resulted in incomplete activation by insertion of FeS clusters into the apo-versions of those proteins in the absence of NFS1 and ISD11 overexpression. Such FeS proteins would include DHAD used for mitochondrially-localized pathways or portions of pathways for isoleucine, valine, leucine, pantothenic acid or isobutanol production, or natively mitochondrially-localized proteins such as aconitase or biotin synthase or the mitochondrial respiratory chain Complex I component, or FeS proteins, including heterologous DHADs from other organisms, not natively localized to the yeast mitochondria but engineered to be targeted for mitochondrial localization.

[0448] Interestingly, although Nfs1 and Isd11 are mitochondrially-localized proteins in yeast, overexpression of NFS1 and ISD11 demonstrated an increase in isobutanol production in GEVO6014, a strain of S. cerevisiae which contains an isobutanol producing metabolic pathway comprising a cytosolically localized DHAD (the ilvD gene product of L. lactis). This cytosolically localized DHAD is believed to be a 2Fe2S-cluster protein. Because both isobutanol production and DHAD activity increased in a recombinant microorganism overexpressing NFS1 and ISD11, much of this DHAD activity increase is probably due to increased activity of the cytosolic L. lactis DHAD, indicating that overexpression of NFS1 and ISD11 increases the activity of cytosolic and/or 2Fe2S-cluster proteins. Accordingly, overexpression of NFS1 and ISD11 in yeast biocatalysts can be used to increase activity of cytosolically-localized FeS proteins, containing either 4Fe4S-clusters or 2Fe2S-clusters, and can also be used to increase the activity of 2Fe2S-cluster proteins other than 2Fe2S-cluster DHADs. Such FeS proteins would include DHAD used for cytosolically-localized pathways or portions of pathways for isobutanol production and cytosolic pathways or portions of pathways for leucine biosynthesis, for example. This would include FeS proteins that natively remain in the yeast cytosol when expressed in yeast biocatalysts, either heterologous FeS proteins or native yeast FeS proteins, and/or FeS proteins not natively localized to the yeast cytosol but engineered to be targeted for cytosolic localization when expressed in yeast biocatalysts, such as natively mitochondrially-localized FeS proteins, e.g., the yeast DHAD Ilv3, engineered to remain in the yeast cytosol.

[0449] The foregoing detailed description has been given for clearness of understanding only and no unnecessary limitations should be understood there from as modifications will be obvious to those skilled in the art.

[0450] While the invention has been described in connection with specific embodiments thereof, it will be understood that it is capable of further modifications and this application is intended to cover any variations, uses, or adaptations of the invention following, in general, the principles of the invention and including such departures from the present disclosure as come within known or customary practice within the art to which the invention pertains and as may be applied to the essential features hereinbefore set forth and as follows in the scope of the appended claims.

[0451] The disclosures, including the claims, figures and/or drawings, of each and every patent, patent application, and publication cited herein are hereby incorporated herein by reference in their entireties.

The application's sequence listing, which the Patent Office published only in electronic form, follows.

SEQUENCE LISTING (273 sequences)

SEQ ID NO: 1 - DNA, 2073 bp, Saccharomyces cerevisiae
atggaaggcttcaatccggctgacatagaacatgcgtcaccgattaattcatctgacagccattcatcctcctttgtatatgctctacccaaaagtgctagtgaatatgtagtcaaccataatgagggtcgtgcaagtgcaagtggaaatccagccgcagtgccgtctcccataatgacactgaatctcaaaagcacacattccctcaatattgatcagcatgttcatacctcaacatcgccgacggaaactattgggcatattcatcatgtggaaaagctgaatcaaaacaatttgattcatctggatccagtacccaactttgaagataagtccgatattaagccttggttgcaaaagattttttatcctcaaggaatagaacttgtgatagaaaggtcggacgcatttaaagttgtcttcaagtgtaaagctgctaaaaggggaaggaacgcgagaaggaaaagaaaagataagcccaaaggacaggaccacgaagacgagaaatccaagatcaatgatgacgaattagaatatgcgagtccttctaatgccacagtaaccaatgggcctcaaacatcgcccgatcaaacatcctccataaagccaaagaaaaaaagatgtgtatcgaggtttaataactgtccgtttagagtacgagctacttattcgttaaagaggaaaagatggagcattgttgtaatggacaataaccattcacatcagctaaagtttaaccctgattccgaagagtacaaaaaattcaaagaaaaattaagaaaggataatgacgtagatgcaatcaagaaattcgacgaattggaatacagaactttggccaatttgcccattccaacagctacaatcccctgtgattgtggtttaacaaatgaaatacaaagtttcaatgtcgtattgcccactaacagtaatgttacttcatcagcatcctcttcaactgtatcgtccatatcccttgattcatcgaatgcatctaaaaggccatgcttaccctctgtaaataacaccggtagtatcaataccaataacgtaaggaaaccgaaaagccagtgtaagaataaagacacactcttaaaaagaaccaccatgcagaactttctcacaactaaatcaaggctgcgtaagaccggtacgccaacatcttcgcaacactcatctacagcattttcaggatatattgatgatcctttcaatttgaatgaaatcttgccactgccggcatccgatttcaagctaaacactgtaacaaatttgaacgaaattgactttacgaacatttttaccaaatcgccgcatccacatagcgggtctacccatccaagacaagtcttcgaccaattggacgattgttcctctatactcttctctccattaactacaaacacgaataatgaatttgaaggagagtcagatgattttgttcattctccatatttgaactcagaggcagatttcagccaaattcttagtagtgctcccccagtccatcatgacccaaatgaaacacatcaggaaaaccaggatattattgatagatttgctaatagttcccaagaacataatgagtatattctacaatatttgacgcactccgatgctgctaaccacaataacatcggcgttccaaacaacaattcacattcgctaaatactcagcataacgtttctgatctgggcaactcacttttaagacaagaagctttagttggcagctcttcaacaaaaatcttcgacgaattgaaatttgtacaaaatggcccacacggttctcaacatcctatagattttcaacatgttgaccatcgtcatctcagctctaatgaacctcaagtacgatcacatcaatatggtccgcaacagcagccaccgcagcaattgcaatatcaccaaaatcagccccacgacggccataaccacgaacagcaccaaacagtacaaaaggatatgcaaacgcatgaatcgctagaaataatgggaaacacattattggaagagttcaaagacattaaaatggtgaacggcgagttgaagtatgtgaagccagaagattag

SEQ ID NO: 2 - protein, 690 aa, Saccharomyces cerevisiae
MEGFNPADIEHASPINSSDSHSSSFVYALPKSASEYVVNHNEGRASASGNPAAVPSPIMTLNLKSTHSLNIDQHVHTSTSPTETIGHIHHVEKLNQNNLIHLDPVPNFEDKSDIKPWLQKIFYPQGIELVIERSDAFKVVFKCKAAKRGRNARRKRKDKPKGQDHEDEKSKINDDELEYASPSNATVTNGPQTSPDQTSSIKPKKKRCVSRFNNCPFRVRATYSLKRKRWSIVVMDNNHSHQLKFNPDSEEYKKFKEKLRKDNDVDAIKKFDELEYRTLANLPIPTATIPCDCGLTNEIQSFNVVLPTNSNVTSSASSSTVSSISLDSSNASKRPCLPSVNNTGSINTNNVRKPKSQCKNKDTLLKRTTMQNFLTTKSRLRKTGTPTSSQHSSTAFSGYIDDPFNLNEILPLPASDFKLNTVTNLNEIDFTNIFTKSPHPHSGSTHPRQVFDQLDDCSSILFSPLTTNTNNEFEGESDDFVHSPYLNSEADFSQILSSAPPVHHDPNETHQENQDIIDRFANSSQEHNEYILQYLTHSDAANHNNIGVPNNNSHSLNTQHNVSDLGNSLLRQEALVGSSSTKIFDELKFVQNGPHGSQHPIDFQHVDHRHLSSNEPQVRSHQYGPQQQPPQQLQYHQNQPHDGHNHEQHQTVQKDMQTHESLEIMGNTLLEEFKDIKMVNGELKYVKPED

SEQ ID NO: 3 - DNA, 1251 bp, Saccharomyces cerevisiae
atgaaagcaaagtcgatgaagagcataatatctgtgccaatatcagtgtctaaaacagggaaaatgaagttaacagcatctcccgataatctagcatctatgatgtctaaagaccaaaataaacttattcatttagacccagttccgtcttttgaggacaggcacgagattaaaccgtggctacagaaaatattctatcctcaaggaatagatatagtcatcgaaagatcagatagtagcaaagttacttttaagtgtaggtcagtacgatcgaaagtagggttgaaccctaaatccaaaggttcctcttcaagatcccatgcatgtccatttagaattagagcagcctactctgtgcggttacagaagtggaacgtggttgttatgaataacatacattcacatgagctgagatttgatttgattactaaaacggatgactataaaaagtttaaggaaaatcttcgtcagaagaacgacgaaaaagccatcaaaacatttgatgaattagaatataaagcaagtctaaacttaccactcgtcacaccaattatttcttgtgactgtgggttaaccaaggaaattgaagctttcaataacatttttctcccactatcaaacccccctttgacgtctaaaaaaaatttgctcaaaacaaataaaaactccgtttctaaaataaaatccagacagatggataattcgaaacctaggccaaggttgaaaacgaagttggatgcggatctacatgataccggatttttagacaatttcaaaacgcggaattcctgtgtaaagatagagaaagaagattctttaacgaacttaaacgaaattgattttacgaacatgttttgcaacgacaatttcatccaaaattacaaccaaggcctgatggaacttttgacagaacctacaccaggtccttcgtcctcttcttgtatacttccttcaacaccaacgaggcccttgtcacaaagcaaaatggatatagccctgtcagaatcaacaacatcttcaccaaattttatggaaacagacgctccttatggagatgagatcattaaagtttccaaagataccaaaagcaacgcaccaactgctgatacagatattgctacgaacttaggcaaagagagaaacgaaaattttggcatgttaaactacaactacgaagcgttgcttcatttcaacgatgagcattttaatgaattaaattctattgacccagccttaatatcaaaatattaa

SEQ ID NO: 4 - protein, 416 aa, Saccharomyces cerevisiae
MKAKSMKSIISVPISVSKTGKMKLTASPDNLASMMSKDQNKLIHLDPVPSFEDRHEIKPWLQKIFYPQGIDIVIERSDSSKVTFKCRSVRSKVGLNPKSKGSSSRSHACPFRIRAAYSVRLQKWNVVVMNNIHSHELRFDLITKTDDYKKFKENLRQKNDEKAIKTFDELEYKASLNLPLVTPIISCDCGLTKEIEAFNNIFLPLSNPPLTSKKNLLKTNKNSVSKIKSRQMDNSKPRPRLKTKLDADLHDTGFLDNFKTRNSCVKIEKEDSLTNLNEIDFTNMFCNDNFIQNYNQGLMELLTEPTPGPSSSSCILPSTPTRPLSQSKMDIALSESTTSSPNFMETDAPYGDEIIKVSKDTKSNAPTADTDIATNLGKERNENFGMLNYNYEALLHFNDEHFNELNSIDPALISKY

SEQ ID NO: 5 - DNA, 1608 bp, Candida glabrata
atggattccaaccaactaatacacttggattcggttcctaatttcaaggataagaatgagattaaaccatggttacagaaaattttctacccgcagggaatagagatcgtcattgagagatcagacagtcttaaagttgtatttaagtgtaaagctgccaagaggggcaggaagagtcaggaagaacttaccgaggaagaacgtttacggcaagaggctttggctagggaacatgaaatgaagaggaagtctatgggtaacaagaggtgtgtgtcgcgatataatcactgtccattccgagtacgggcaacttattcgctaaagaggaaaaaatggagtgtagtggtgttaaataatacacatacccatcctttaaaatttaatcctttatctgaggagtataagaaattcaaagagaaacttcgagccgataatgatgtcgatgccataaaaatgtttgatgaactagaatatcgaacgcaacataacttaccacttccaacatcgatcattccttgtgattgtggtctgactaatgaagtgaaaagctttgatgtggtattacccaaaactatggtaccagacgaattatcggttaaggctagcgaaatctcattaaagaaagtattggaagaagatgaaaactgtacattcttgacaaatctgaaaaaatccagtgcaatctcaaagaataaaggagtgaagcgattgaaacccaagcattcgctatctggcaatacagaaactttaagaaaaaatcttctttggaaaagtaatcaaatttactatagtgagactgctgtaaattcgccgatgttagattcttctccaaatttatttggaaatcaattatctttgtctacaccagatttggtggcagcagatgctggcagtaatggcagtcaaatatctaccaaagcctttagtgattttatagatgatccatttacagtgggtactaatggcaatggtgcagacttccaaccattcacagcttcaaatacagggaatgcaataaccaatttggacgagattgattttactaatatttttgccagatcgactaataacaaccacaagcacccttataactctacagctattgataggaatgattcaccaacatcaaatgctcctttatcagtaaaaaatgcctatgatggacttgatgattgttggtcaatatacatgtcaccaaacactacccatgatgacacacctgttgatatttcccctgcatcctctaaactacataacaagatgcctagaattccagagcaaaggtcagattctttacaaccgaatgttcggtttaatgatacagctttaaaacatgaaagtttattcacagatgacctcataaataagagtagtccaagacatgacgttggagatgaattcttgtttgataagatgctgaataaagaattgacgtctttgaacgaatttacagagaacaaacattctgactatcctgtaaacgcgggttcatttaatcttgatgtctttggaccttctgtcgataacaatgattctttgtccactttagattttactaagcctatgaacgataactttgttaaattagaagaagatcacataatgtga

SEQ ID NO: 6 - protein, 535 aa, Candida glabrata
MDSNQLIHLDSVPNFKDKNEIKPWLQKIFYPQGIEIVIERSDSLKVVFKCKAAKRGRKSQEELTEEERLRQEALAREHEMKRKSMGNKRCVSRYNHCPFRVRATYSLKRKKWSVVVLNNTHTHPLKFNPLSEEYKKFKEKLRADNDVDAIKMFDELEYRTQHNLPLPTSIIPCDCGLTNEVKSFDVVLPKTMVPDELSVKASEISLKKVLEEDENCTFLTNLKKSSAISKNKGVKRLKPKHSLSGNTETLRKNLLWKSNQIYYSETAVNSPMLDSSPNLFGNQLSLSTPDLVAADAGSNGSQISTKAFSDFIDDPFTVGTNGNGADFQPFTASNTGNAITNLDEIDFTNIFARSTNNNHKHPYNSTAIDRNDSPTSNAPLSVKNAYDGLDDCWSIYMSPNTTHDDTPVDISPASSKLHNKMPRIPEQRSDSLQPNVRFNDTALKHESLFTDDLINKSSPRHDVGDEFLFDKMLNKELTSLNEFTENKHSDYPVNAGSFNLDVFGPSVDNNDSLSTLDFTKPMNDNFVKLEEDHIM

SEQ ID NO: 7 - DNA, 1314 bp, Candida glabrata
atgaatcgtaagaacacgctcaggggttctgctaaaaacagacccacgaccacacctgataacttagaaaatgccttaatggtgaatgaaaaccaactgatacatatcgacccagtacctgactttcaagagaagatagatgttaaagtatggctacaagaaatgtttttccccatggggatagatattgtcatcgagaggtccgataaaacaaaaataatattcaaatgtaaacctagtgattacagaagccatgaaccaaaggacctacggcaaaaggaaccagttgacgataaaagacacatatgcccatttagggtgcggtgtactttctctacccaactaaagaaatggaagatcgtgataataaataactcgcactctcatccattgaaattcaacccacactcagatgaatatgctaagtttaaaagaaatctaagagatagagaaatgactgaaacgttgaaaaagtttgaagaactagagtataaagccaagtcaaatcttccgatggaaaatctgctatcaggaaactcaattatttcttgtgattgtggcctaacgaaggaaattaagacaatcaataacgtttacttgccactaaatgccactcaattacaggatgagatagatgtctcgaaaatactggagtgtcaaaataaaaaacaaaagaataaacaaaaggtaatgaagaaaagaaagagcgagaaaaacgaacttgctaacattaagaaagaggaacctagctgttcaagtgctttgattcatgacaaaggcttcgaaatcactcaagatgatctcatacaatgtggtatcaatgatattaacgattatgactgcgataaatactacacagagcttctgaacaaggaaagttacgcggatgcatcctattgtaacatcgcagatttttcgaacatgaacgaaattgattttactgggatgtttaacaaatcaaaaccagctcaacctagtctcactaaaggtgatgatctttttagttcaatagcaaatgataacttctttagttatgaagagaatatcaaggatacgacattggtagagccagaacttctaatggcgcctgtacaagacatcaacgaaaacaatatcgatgatatattcaagatgtccactaacacatcatctactccaatatcaccatctactgacccatcaactgatattgaccaaaaaatacccgaccctctcgagttcgagaatgtcaattatttagacaagtatgttgatctatcaaccgtaatgattaatgatcctgcgaaggaaacttacgactctctttttagttaa

SEQ ID NO: 8 - protein, 437 aa, Candida glabrata
MNRKNTLRGSAKNRPTTTPDNLENALMVNENQLIHIDPVPDFQEKIDVKVWLQEMFFPMGIDIVIERSDKTKIIFKCKPSDYRSHEPKDLRQKEPVDDKRHICPFRVRCTFSTQLKKWKIVIINNSHSHPLKFNPHSDEYAKFKRNLRDREMTETLKKFEELEYKAKSNLPMENLLSGNSIISCDCGLTKEIKTINNVYLPLNATQLQDEIDVSKILECQNKKQKNKQKVMKKRKSEKNELANIKKEEPSCSSALIHDKGFEITQDDLIQCGINDINDYDCDKYYTELLNKESYADASYCNIADFSNMNEIDFTGMFNKSKPAQPSLTKGDDLFSSIANDNFFSYEENIKDTTLVEPELLMAPVQDINENNIDDIFKMSTNTSSTPISPSTDPSTDIDQKIPDPLEFENVNYLDKYVDLSTVMINDPAKETYDSLFS

SEQ ID NO: 9 - DNA, 1677 bp, Zygosaccharomyces rouxii
atggatagtattagtaccagctctggtttagtccccgattcaatgacggagtcggcggaaagtcatagtagacagaccaacgatggaagtttagcgatacaagccaatgaattaccaaaggcattagcagaagatcaaaacaaatttattcatttagatccggtacctgattttagagacaaggcagaaattaaaccatggttacagaaaatcttttacccacaggggatagaaattgtgattgaaagatcagataatattaaagtcattttcaaatgtaaagccgcgaaaagaggtaaaaatacgaagcccaggcgaaatgaagtcacaactacaagttcaatgagtgcaagctcttcaagtgttactagtccaaatacaggattaagttcagcagcaggtaaaaagaaaagatcagtatcgagattcaatacatgtccatttagaatacgtgcaactttttcattaaagagaaggaaatggaacatagttgttgtaaacaattcacactctcacgaactaaaattcgatcctgatagtgatgaatatcgtaaatttaaggaaaaacttagggaggacaacgattgggatgctgtaaagcaatttgatgaactagaatataaatcaagatctaatttaccgattgaatcttcattgataccgtgtgaatgtggtcttaccagtgaaattgaaagttttagtatcgttttaccaagtacaaagccagctcaaaataataatagtactgatagccctagtactaatattactaatagaaatagcgtttcgagcattggcagtggaattgggagtaatagtagcggaatggcacctgtaattagtaaaccaagaagtaaaaagtggcagcagcagcaacaacaaaggcatagagaaaagttgatgagaaatccttccactgagcatcttttcacacaatcacaattacaattacaattacagcagttacaacagggttgtccagttgaatttttggacccttcaatatttacggattcatttgcatcttcgccagcatcttcaacgatggcaactcaaccgccacaacaacaacaacagcaacagcaacagcaacagcagcaacattcactccaattgactgatcctcttactgaatttaacgagattgattttacggatattttcaaaccacattcaattcacttacaagatgtacattcaaacactcaacaagatcatggatcggatcttttgcaaccatcacaatcaagtcctccacaatttttagataccaatcatgaaacggctagtagaagagatgaatttccaccacttttattttcaccgcttgatgcggctgcaaacgagcttatgaccccaacagatgatatgtccgtatcaccatcacatacatcaaattcacaaaataatagtagtcagcgatggccaactggcatttctattcatgatcaacaccaacaccaacaccaacaccaaccaattttacgacagtacttcaacgatgatgagattttagcgccagcaaggcttgcctcgttatggccacagcaacaagaaacgtcttcatcaagtccactgcgtagggtggttaatgctgtcgattctcaatcgccttgtaatgaaaatgactacgcagttgacgaccttctgtggaagatgaatttcgaaaacgcataa

SEQ ID NO: 10 - protein, 558 aa, Zygosaccharomyces rouxii
MDSISTSSGLVPDSMTESAESHSRQTNDGSLAIQANELPKALAEDQNKFIHLDPVPDFRDKAEIKPWLQKIFYPQGIEIVIERSDNIKVIFKCKAAKRGKNTKPRRNEVTTTSSMSASSSSVTSPNTGLSSAAGKKKRSVSRFNTCPFRIRATFSLKRRKWNIVVVNNSHSHELKFDPDSDEYRKFKEKLREDNDWDAVKQFDELEYKSRSNLPIESSLIPCECGLTSEIESFSIVLPSTKPAQNNNSTDSPSTNITNRNSVSSIGSGIGSNSSGMAPVISKPRSKKWQQQQQQRHREKLMRNPSTEHLFTQSQLQLQLQQLQQGCPVEFLDPSIFTDSFASSPASSTMATQPPQQQQQQQQQQQQQHSLQLTDPLTEFNEIDFTDIFKPHSIHLQDVHSNTQQDHGSDLLQPSQSSPPQFLDTNHETASRRDEFPPLLFSPLDAAANELMTPTDDMSVSPSHTSNSQNNSSQRWPTGISIHDQHQHQHQHQPILRQYFNDDEILAPARLASLWPQQQETSSSSPLRRVVNAVDSQSPCNENDYAVDDLLWKMNFENA

SEQ ID NO: 11 - DNA, 1359 bp, Ashbya gossypii
atggagtactcgcaggacgcatggggcaaacagtcgccgctggatgcgtcgccgtcggcgtggtcggtgtcggagacggcaggggacgtgccgagcggggcgtcggcgacgacggccagcgggcacaacgtggagggcagcggggcgcgcagcagcccctactcggaagcgagctacaataacgtgctgagcgaccaggccatcgagcggatccggcggcagcagaaccagaacaagctgatccacctggagcctatcccggacttcaaggacaaaaacgacatcaagccgtggctgcagaagatattttacccacagggcatcgagatagtgatcgagcggtccgacaagatcaaggtggtgttcaagtgcaaggcgtcgaagcggacgaagagcgggtccgcgccgggctcgcaggccggcgcggcggaggacgagctgggcgggcagtacgagacgctgccgctgtctccggtggtgacagcgtcgcagctgcgcaaaaagaagcgcgcggtgtcgccgtacaacacatgtccgttccgggtgcgagcggcgtactcgctcaagcgcaagcgatggagcatcgtggtggtcaacaacgggcactcgcacccgctgaagttcaacccggactcggcggagtaccgaaagttcaaaaataacctgcggcaggagtgcgactgggacgcggtcaagaagttcgatgagctggagtaccgcagcaagttcaacctgcccacggagccgacgccgataccctgtgactgcgggctgactcaggagatcgagtccttcaacgtcattctgcccagcaccaacatcctgggctcctccgcgcccgtcttcaccgagaagaagacggtctcgaagccgcgatgccgcaagacgctgcagcgcgaccgctgctcgcagctgcgacgccagagcacgcagtcgaagctcacgcacgagctgcacacggcgctcagtccgacgctggggtcgtcagccgacaccctcggctcgcccgtgcgctacgccgcgcaggacgcagaggtcgacttcacggaggtcttcctgcgctcgctgccgcccgcgaagccactgcactccgcgcgcgcgcccgacgccgcgcgcgacagctggcacgcgctcgagcagctgctcgacgaccccgcggacgcgccgccccgcacgccgctcccgtccgcgtccgcagactgcgtcaacccgctgctgcacttcgcgcagcgccccgcggacgatcccgtcgactcgctcgcctacgagctcaacgcgctcagcgccatggactctccgttcgcccgccccgcgcccgacgcccagtttctctgggaggaccccaagtatttcccctag

SEQ ID NO: 12 - protein, 452 aa, Ashbya gossypii
MEYSQDAWGKQSPLDASPSAWSVSETAGDVPSGASATTASGHNVEGSGARSSPYSEASYNNVLSDQAIERIRRQQNQNKLIHLEPIPDFKDKNDIKPWLQKIFYPQGIEIVIERSDKIKVVFKCKASKRTKSGSAPGSQAGAAEDELGGQYETLPLSPVVTASQLRKKKRAVSPYNTCPFRVRAAYSLKRKRWSIVVVNNGHSHPLKFNPDSAEYRKFKNNLRQECDWDAVKKFDELEYRSKFNLPTEPTPIPCDCGLTQEIESFNVILPSTNILGSSAPVFTEKKTVSKPRCRKTLQRDRCSQLRRQSTQSKLTHELHTALSPTLGSSADTLGSPVRYAAQDAEVDFTEVFLRSLPPAKPLHSARAPDAARDSWHALEQLLDDPADAPPRTPLPSASADCVNPLLHFAQRPADDPVDSLAYELNALSAMDSPFARPAPDAQFLWEDPKYFP

SEQ ID NO: 13 - DNA, 2472 bp, Kluyveromyces lactis
atgaagcacgagctacagacacctattgaaggagtggatcccttggatcctcttcataatccggatttatggcagccttctccatcttttgacaatatgatggcttcgccgaagacttcgcccatcggttctggactgtcccatacaccggcggctcaccatgttggctcgaatttatcctcgagtaataatagcgaagtctcttataacaatgcgttgagtgaaaacgcgatagaagctcttcggagacagcaagaccagaataaattgattcatttggatccgatccctgacttcaaagataagagtgaagttaaaccgtggttacagaagattttttatccacaggggattgagatcgtcattgaacggtcggatagcatgaagatcgtgttcaaatgtaaagctgttaaaaagaatagaaatacttcgtctatatccgggtgtggtcacagccacggcgttggtagcgatagttgtaacactaatgggaagaacagtactaagggtaatggtagtaatgataataagtgtaggaaaaagggaatcgggaagggttttgccgaatgtgatggtcttgaaacagagacagaaaacggtaataatagtaacagtactgtcggtggtggaaatggtagtaacgatacagacaagaagaaacgtgccatcggaccgtacaattcatgtcccttcagagtgcgagccacgttctctttgaagagaaagaagtggaacatcgtcgttgtcaataacgtacacacccatccgttgaagtttaaccccgatagtgaagattataaaaagtttaagaatgctctaaaggaaagcggagaccttgaaaccgttaaaaagttcgatgaattggagtacagaacaaggtttaacttgcccattgatcttagtcccatcccctgtgattgtggtcttactcaggaaattcaatccttcaatatcgttttgcctacaacaaatatcatcgtacctgggtcaaggaatacttccatggatgccaatacagtaacaaaaccaaagaagaccggtaaaaaagctgtcaagagtaagactacaaaacagctgagacgtaaaagcacaaagaaaaagttacaacaagatatagagagcaatagtgcaaacacttcgagaacagcaactccgctaagtactgtgcagaattcgttgaatttacagttcgattcccaatcaaatgtttcagtagctccatctgtgacttctaacctgaattcaaacttggccctaacgcctcaagagaatatttactcaactgatttcttgccgaatactgcttcttcgcaacagatggattcacctaacttctcaaacttcaactcgaactatttcaacgtgcaaaatgaaattgacttcacggagttcttcagtaaacctttgcctcacttcaaaaataatcgacatgatgtggttacaggccaaggcatgattccacttacattttcccagaaacaccaaacgagttctcaaagtgctcaacatacccctcaccaaaacatcaacagtaatctaatgtaccataatgctggttctgcatcttctacgcattcgtccccaaatatgagtataatgacgtctgtaaagactcccattacaacggctactcccagtacaaactctcacaatatgaacgcgatcagttctgtgccactttattcgtccaacttggccaaggagcctatacaagatttcattgacatgaaccaaatatttggtacttcaaccaataataatgaccattctaatgctaatacttcatccgttaatactaataataaccatcttcatcaacaacataatactagtcatgctaatgccatgataccttcgcattcactaaatttccaacattccaatctatcgccagtaaatcagaacattagtgcagtatgcgaaattaacaactttgacgtatgtgctaatgaccctcaatgtggtggtcctctcattggtactgctactggtattcatggactcaatatagatcgttcaaacatggagatcgctaatggtatcagccaatcaaacgatgcgacgggctacatggatcctctgcatacaaagccagattatgatgctcaatcacaggaatacatttctaatgtattaaactctgacttcaacgaactgcgattatcacaaagtcaacataatcaaggagagcaacaccatcaacaacatatgcagcagcaacgccgccaccagcatcagatgcaaaatcaacagcaacagcaaatgcaacagcaacagcaacagcaacaacttcatgatcagcacaaccctctacatgagattttacctttgaaagaggaagagattgaagagctcgttgcgaattcggagtacaattatcacctacagtttaataatgatcttgaccaaccgcagcaagctacgcataatccacaaatgctttgggatgaacctcacggcttttttcaatga

SEQ ID NO: 14 - protein, 823 aa, Kluyveromyces lactis
MKHELQTPIEGVDPLDPLHNPDLWQPSPSFDNMMASPKTSPIGSGLSHTPAAHHVGSNLSSSNNSEVSYNNALSENAIEALRRQQDQNKLIHLDPIPDFKDKSEVKPWLQKIFYPQGIEIVIERSDSMKIVFKCKAVKKNRNTSSISGCGHSHGVGSDSCNTNGKNSTKGNGSNDNKCRKKGIGKGFAECDGLETETENGNNSNSTVGGGNGSNDTDKKKRAIGPYNSCPFRVRATFSLKRKKWNIVVVNNVHTHPLKFNPDSEDYKKFKNALKESGDLETVKKFDELEYRTRFNLPIDLSPIPCDCGLTQEIQSFNIVLPTTNIIVPGSRNTSMDANTVTKPKKTGKKAVKSKTTKQLRRKSTKKKLQQDIESNSANTSRTATPLSTVQNSLNLQFDSQSNVSVAPSVTSNLNSNLALTPQENIYSTDFLPNTASSQQMDSPNFSNFNSNYFNVQNEIDFTEFFSKPLPHFKNNRHDVVTGQGMIPLTFSQKHQTSSQSAQHTPHQNINSNLMYHNAGSASSTHSSPNMSIMTSVKTPITTATPSTNSHNMNAISSVPLYSSNLAKEPIQDFIDMNQIFGTSTNNNDHSNANTSSVNTNNNHLHQQHNTSHANAMIPSHSLNFQHSNLSPVNQNISAVCEINNFDVCANDPQCGGPLIGTATGIHGLNIDRSNMEIANGISQSNDATGYMDPLHTKPDYDAQSQEYISNVLNSDFNELRLSQSQHNQGEQHHQQHMQQQRRHQHQMQNQQQQQMQQQQQQQQLHDQHNPLHEILPLKEEEIEELVANSEYNYHLQFNNDLDQPQQATHNPQMLWDEPHGFFQ

SEQ ID NO: 15 - DNA, 2100 bp, Vanderwaltozyma polyspora
atggtctcagaaaaagatattatatggaaccctatagttcctctctcagaacttaatcaagatgatacaataaatgaaaataatactactaaaaataataaaaatccaaaacctagcgatacttatattcatctagatccaataccagattttcaggatacctctgaagtcaagccctggttacaaaaaattttctatccacaaggtgtggagctcgttatcgaaagatcggataatacaaaagttgtcttcaaatgtaaagctgcaaaaagaggcaaaggttcaagattaccatctaaaacaacaacaactactaataataataacaatgatgatgaaaatgatgaaaatagcgaaaataaagagactaatagcaacgacgataaaaatagtaatgttataaatgatggatatttagataaaccaaagaaaaagagagtagtatcgagatttaatacctgtccattccgtataagagcaacttattcaatgaaaagaggaaaatggaatatcgtaatattaaacaataaacattctcatgatttatcgttcaatcccgattcaatagagtataagaaatttaaagaaagattaagattaaataatgatgtcgaagcaataaaaaaattcgatgaattggaatataaagtacgatcaaatctacctctgagcccttcgttagtggtttgtgattgtgggttaacaagtgaaattcaatcattcgatgtggttttaccaacaaatgactctttaaatacaaatatcgtcgatctatcaaataaaaatttagaaacaaatttcaaccaacagtctgtaaatgttaaaaaaccaaaaaaattgaaaaatgtaaagtcaaaagcaactaacttgaatatacatcaagaaaatttgttgaaaaagaccactacccaaaattttttaactaatcgcaatgcaaattctcaccctcagccaattccctcatcttcaccaataacttcaaataatattcattcaaatatgcattcctataatcatagtcatagtcatagtcatagtcatagtcattcacatactcatatgaatggtcatactcatacccataatcacacaacacctccagttgaatctctagatttgttgcagccagatactttcaattcattgactttctcaaagttaaccactgatttagatgaaatcgatttcactgatatattcaacaagcctctatataataaaaatcacaatcatcatcatcaccaccatcatcatcataattttgaggataataacaactataatgagtataatgataatgatataaactcccattcatctttatattcaccaattaccaatggaggaactcctaagatgttggaaagtgatacaatttcaccaaacccagacttatttccttctcaatacgaattacagcataattacagttattcaaataaccaaatttcatcacctttaaaagattcaccatcacattattcaaatatggattttacccattcttatctttccacaaataataactacaagaaatattcaattacattatgtgaaaataataacagtaatatttgttataacgatgaatgtatcaaactacacgatatacagccgatcaagaatgagttcataggcacacagtcgttgaattcactaaatgaacaagctaaaggtgaatatgatccaatgcatttaattcagaaatttatgaatacatctaacgatgataatgtcattaaaagtgcaaccaccggaaacgcggttttaataaaaaatgagttagatttaacgtctgtaccattgacatttgacagtgaaggtaatcatataactttagataacatttcatctagtcaacctaaaaggaaacaaaatgaatcgggtaattcaaatctctctgatctttcaactctaatacctaacaatcaagaagcattcccacaagttataagtgatatagacataactaattacaattttgaaagtattaacactactaataaagccattaatggtaacactaacacttcaatccaagatgataaaggctcattatcgccctcaatttgggagaacacattcgatgatattttgtaa

SEQ ID NO: 16 - protein, 699 aa, Vanderwaltozyma polyspora
MVSEKDIIWNPIVPLSELNQDDTINENNTTKNNKNPKPSDTYIHLDPIPDFQDTSEVKPWLQKIFYPQGVELVIERSDNTKVVFKCKAAKRGKGSRLPSKTTTTTNNNNNDDENDENSENKETNSNDDKNSNVINDGYLDKPKKKRVVSRFNTCPFRIRATYSMKRGKWNIVILNNKHSHDLSFNPDSIEYKKFKERLRLNNDVEAIKKFDELEYKVRSNLPLSPSLVVCDCGLTSEIQSFDVVLPTNDSLNTNIVDLSNKNLETNFNQQSVNVKKPKKLKNVKSKATNLNIHQENLLKKTTTQNFLTNRNANSHPQPIPSSSPITSNNIHSNMHSYNHSHSHSHSHSHSHTHMNGHTHTHNHTTPPVESLDLLQPDTFNSLTFSKLTTDLDEIDFTDIFNKPLYNKNHNHHHHHHHHHNFEDNNNYNEYNDNDINSHSSLYSPITNGGTPKMLESDTISPNPDLFPSQYELQHNYSYSNNQISSPLKDSPSHYSNMDFTHSYLSTNNNYKKYSITLCENNNSNICYNDECIKLHDIQPIKNEFIGTQSLNSLNEQAKGEYDPMHLIQKFMNTSNDDNVIKSATTGNAVLIKNELDLTSVPLTFDSEGNHITLDNISSSQPKRKQNESGNSNLSDLSTLIPNNQEAFPQVISDIDITNYNFESINTTNKAINGNTNTSIQDDKGSLSPSIWENTFDDIL

SEQ ID NO: 17 - DNA, 1563 bp, Lachancea thermotolerans
atggatcagtcagcattagacgcgttccatggagaactaatacagacgtcgccgtcactggactttctactggcggaggactcgccgctctcgacagtagatacagtgggaacaggcacgacgagcaacacagagagcagcgggccagatttcacaaacggcacccctagctggaatgacacggccagtctgaataacatgctgagtgaaaacgcgcttgagtccatcaaccggcagcgatcgcagaacaagctgattcacttggatcccatacccgatttccaggatcgtaacgaaatcaagccgtggcttcagaagattttctatccccaaggtatcgagattgtgatcgagcgttctgacaacatcaaggtagtgttcaagtgcaaggcgtcgaaaaggggcagggcctctcgcaagcaagccggttgcgggtcgctgccggaagaaaaggaaaaccccgagagcccgctggcggtgaagagggtacaacaggcaaacaagaaaaagaggtccgtatctccgtataacacatgcccgttccgggtacgcgcgacatattcgctgaagcgcaagaagtggaacatcgtggttatgaataatggacactcacatcctttgaagttcaacgccgatagcgacgactacaaaaagttcaaaaattacctgcgtgagaatgaagactgggacgccgttaagaagttcgatgagctggagtgcaggactcgtttcaaccttcctacacaaccacaaccgatcccctgtgactgtggacttacgcaagaaattgagagttttaacattgtccttcctacgtcggactctctcgcaaattcaaccgacaagacagtgagcaagccacgccacaaatccacgcgcaagggcaataagcagatggccacggctctcagtcgaaattcaacgcctctcggatttttggacaagtcaccgtctcaatcggcacgctctggacaagagccacagcgtatcaagcaggagagcaccggcgccccccaggaacctcattctggcatgacggggttatcgccgatgcaaaactttgatacatctatgtcaggatgggacccaaacacgctcaccagccagtccgaggagattgactttacagacttgtttcttcgacctttgcctcggacaaagcaggaccccatttttgagaagccccaaacgcttaacagtcccgggcgcgaccagccttggaacgcttccaaaaacttcatggacgacctgcaatttcaactcgcgccggtatgcgaacccagccacacaagcaatgcccactgcattcttccgtcatcgacagaggcacatatgaactgcgatgcaatggacgctggctcacagcatgagtttccccatcacagggtccaacagcaagacccaagcatgctgcatagctccccggctaacggaatgctgagctcggaccttggcaacatgcacctcacgggtcagcagatgcaagtgccgcatcctgacccaggactcccctgggaaccacaacacagcaacgaccctcatggatatagtaatgacttctag

SEQ ID NO: 18 - protein, 520 aa, Lachancea thermotolerans
MDQSALDAFHGELIQTSPSLDFLLAEDSPLSTVDTVGTGTTSNTESSGPDFTNGTPSWNDTASLNNMLSENALESINRQRSQNKLIHLDPIPDFQDRNEIKPWLQKIFYPQGIEIVIERSDNIKVVFKCKASKRGRASRKQAGCGSLPEEKENPESPLAVKRVQQANKKKRSVSPYNTCPFRVRATYSLKRKKWNIVVMNNGHSHPLKFNADSDDYKKFKNYLRENEDWDAVKKFDELECRTRFNLPTQPQPIPCDCGLTQEIESFNIVLPTSDSLANSTDKTVSKPRHKSTRKGNKQMATALSRNSTPLGFLDKSPSQSARSGQEPQRIKQESTGAPQEPHSGMTGLSPMQNFDTSMSGWDPNTLTSQSEEIDFTDLFLRPLPRTKQDPIFEKPQTLNSPGRDQPWNASKNFMDDLQFQLAPVCEPSHTSNAHCILPSSTEAHMNCDAMDAGSQHEFPHHRVQQQDPSMLHSSPANGMLSSDLGNMHLTGQQMQVPHPDPGLPWEPQHSNDPHGYSNDF

SEQ ID NO: 19 - DNA, 1818 bp, Debaromyces hanseii
atgactgtctcaattaatttacagcattcattaagtgacctaggtctcgattcacaacgatttacaaacaaggatgatataaaaccttggttacaaaactatctattgcataagaaaggaatccatgttgtaattgcaagatcagatgcaaataagattgtatttagatgtaagtcagataagagcaaagagacagcagagaaattaagtttaggttctagacgccaaatctcatgcccattcaagatacgagctaactactctataagaaaccatgtgtggactttggttgttatgaatgaaaatcatgatcatgaattagataattttggtttaatgcagcaaagtaagcttgcgtatttgtttaaccaccataaaactaatgaatccggactcctttcactgggatccgatgattctacatctgcagcattaacaaatccttcgaaaagtaatacatcttcggacgtattcagctcatttattccatcatcaacggaaatggtttcaccaaatgaagcacatgataaccataacctagctctgtcgattgatgagttgaaggatacggtcacgtctaaagataatagcgatagtgaaaaaatgcttgacacctatgaggaacaaaaaagtaagaagaggaaagtacctaaaggacataatgttaaaaggagaaagactaaaagagagactatctcagtccatgatgaagaccaagaatcccgacaagataaatcgagcaaagaggtagtcggtgatcttagagagcaagttaatttattaatttcgaacacaattattaacaaccaaaacttcaccgataaggaaaagtcaatgatgattaaatcgtttttttcacgctttataaaagactataaaggtattatcaataccgtagcaaatcaacaaaaaatggtactcaacaattggtttaacacccctaatcctgctcaaactaacttacattcccatgcaaacactaatttaattccactatctcccttattaaacgatacagatacagattatacaagtgctaccccaaataatagcaataaccagtcgatagataatttgacacatcttccaaatatgtcgttgggatcatctctaataacaaatgttggagctgcatgtaatagtacaggtccatcaaattccaatgcaaacaataattataacaattttattgttccgccgcaaatgcagttgctgcaaattcaaaaccaaaatcaacaattaccttcattcaacactattcagaaccagcttccgctttcacctaattcgctagcaaataactccaccgcttcattgtttgtgaataatttcaatacgaacttaaattcaaacacgtcatcattaatcccacctataaacaattccaataccaatacaaccctcaacccgtcccacctattaaagtcatccaataagaataatgtattcaataataacatgaacctgacagcatctagtaacttacttagtcgaaacgaattcaaacaaaacagttcattaaacccaattaacaataacatagccctgtcaaacacaataagcttaaatacaaatcaaaattctggctcaatatctaactccaatacactgaataattatactgttaattatggtggtttatcatcgccaaataataatatcattaacccaaatatccagaataattcgaccaacggagcattttataacaaagaaatgcaatctggaaatacaagtaacaatccacaaaattctacaacatcgaatacttctggtgctcttaatcatattgcaagcttgaatgataatggatggtag

SEQ ID NO: 20 - protein, 605 aa, Debaromyces hanseii
MTVSINLQHSLSDLGLDSQRFTNKDDIKPWLQNYLLHKKGIHVVIARSDANKIVFRCKSDKSKETAEKLSLGSRRQISCPFKIRANYSIRNHVWTLVVMNENHDHELDNFGLMQQSKLAYLFNHHKTNESGLLSSGSDDSTSAALTNPSKSNTSSDVFSSFIPSSTEMVSPNEAHDNHNLASSIDELKDTVTSKDNSDSEKMLDTYEEQKSKKRKVPKGHNVKRRKTKRETISVHDEDQESRQDKSSKEVVGDLREQVNLLISNTIINNQNFTDKEKSMMIKSFFSRFIKDYKGIINTVANQQKMVLNNWFNTPNPAQTNLHSHANTNLIPLSPLLNDTDTDYTSATPNNSNNQSIDNLTHLPNMSLGSSLITNVGAACNSTGPSNSNANNNYNNFIVPPQMQLSQIQNQNQQLPSFNTIQNQLPLSPNSLANNSTASLFVNNFNTNLNSNTSSLIPPINNSNTNTTLNPSHLLKSSNKNNVFNNNMNSTASSNLLSRNEFKQNSSLNPINNNIASSNTISLNTNQNSGSISNSNTSNNYTVNYGGLSSPNNNIINPNIQNNSTNGAFYNKEMQSGNTSNNPQNSTTSNTSGALNHIASLNDNGW

SEQ ID NO: 21 - DNA, 2082 bp, Saccharomyces bayanus
atggagggattcaacccgggccacatagaacacctgtctcccattgactccactgacaataatacggcctccttcgtatatccgctgcccaaagctaccggtgagtttgtgaacaatcacaacgaaaatcacagagatgtagatccacccgctgtgccgtcttccatggtgtctctaaattttaaggatccgtcctccccaaatggcgatttccatattcatacatctgcatcccccacggaatctgcagaacatggtcatcaatcagaaaagctgaatcagaataatttggttcatctagatccagtgcccaactttaaagataaagccgacatcaagccttggttacaaaaaatcttctatcctcaaggtatagagcttgtgatagaaagatcggatacctttaaagttgttttcaaatgcaaagctgccaaaaggggaagaaacacaaggaggaaaagaaaggataagtctaacgaacaggaccaagaagaggataagctgcaggtcaatgacgacgaattcgaaaatacaagtagttccaactttatagcatcgagtaatggtgctcgatcgtcacccgaactaacgtcttccgggaagccaaagaagaagaggtgtgtctcaaggttcaataactgccccttcagagtacgagccacttattcattgaagaggaaaagatggagtattgtagtaatgaatagcaatcattcacatccgctaaagttcaaccctgattctgaagaatacaaaaaatttaaagaaaaattaaggaaggacaatgatctggatgcgatcaagaaatttgatgagctagaatatagaacgttggccaatttacccattccgacagctacaataccttgcgactgtggtctaacaaatgaaatccaaagttttaacgttgttttgcctactaacagcaagtcatcctcgtctgcatcatcttcaagtgtatcgtcagtgtctctcgatccttcgagtgcctccaaaagaccatgcttaccccctgtaaataacattggtaatatcaatactaacaatataaggaaaccaagaagccaatccaagaataaagatacactcttgaaaagaacgaccatgcaaaatttcctcactacgaagtccagactacataagacgggcaccccaacatcttcacagcattcatctacagcattttctggatatattgacgatccattcaatttgaacgaaatattaccactaccgacatccgattttaagccaaatactgttaccaatttaaatgagatcgattttacaaacatattcactaaaccgtcacatcctcatagtgggaccactcatccacgacaggtctttgaccaattggatgattgttcctcgatactcttttctccattaactacaaacacaaataatgaatttgaagtagagtcggatgatttcgttcattctccatatttgaattcggaaggcgatttcagccaaattctcaataatgcttcccctgctcatcatattccagatcacacgcatttggaaaatcaagatattattgataggtttgccaatagttcgcaagagcagaacgagtacatcttgcaatatttgacacacttcgatgccgcaaacaatgccgccaatacttcgaacgatatttcacattcattaaacatccaccataatattactgacctgagcaactcacttctcaaacaggaaactttgatagataacccttcgactagaatctttgacgagttaaagttcatacaacataacccacacggtgctcaccaccctgtagaatttcaacatgaaaaccataatcatctaatgtcgaatgaacctcaaatacgacaccagcaatatgggccgcagcagcagcagcaacaacaacaacaacaacaacaacatgaatacccccatagtcacgaccaccacgatcatcatcacaaccagcatgaagaagtacgaaaagaggtacaagcacacgaaacacttgaaataatgggaaatacactattggaggaattcaatgacattaagatggtcaatggcgaattgaaatacgtgaaacgagaagattaa

SEQ ID NO: 22 - protein, 693 aa, Saccharomyces bayanus
MEGFNPGHIEHLSPIDSTDNNTASFVYPLPKATGEFVNNHNENHRDVDPPAVPSSMVSLNFKDPSSPNGDFHIHTSASPTESAEHGHQSEKLNQNNLVHLDPVPNFKDKADIKPWLQKIFYPQGIELVIERSDTFKVVFKCKAAKRGRNTRRKRKDKSNEQDQEEDKLQVNDDEFENTSSSNFIASSNGARSSPELTSSGKPKKKRCVSRFNNCPFRVRATYSLKRKRWSIVVMNSNHSHPLKFNPDSEEYKKFKEKLRKDNDLDAIKKFDELEYRTLANLPIPTATIPCDCGLTNEIQSFNVVLPTNSKSSSSASSSSVSSVSLDPSSASKRPCLPPVNNIGNINTNNIRKPRSQSKNKDTLLKRTTMQNFLTTKSRLHKTGTPTSSQHSSTAFSGYIDDPFNLNEILPLPTSDFKPNTVTNLNEIDFTNIFTKPSHPHSGTTHPRQVFDQLDDCSSILFSPLTTNTNNEFEVESDDFVHSPYLNSEGDFSQILNNASPAHHIPDHTHLENQDIIDRFANSSQEQNEYILQYLTHFDAANNAANTSNDISHSLNIHHNITDLSNSLLKQETLIDNPSTRIFDELKFIQHNPHGAHHPVEFQHENHNHLMSNEPQIRHQQYGPQQQQQQQQQQQQHEYPHSHDHHDHHHNQHEEVRKEVQAHETLEIMGNTLLEEFNDIKMVNGELKYVKRED

SEQ ID NO: 23 - DNA, 2013 bp, Saccharomyces castelli
atgagtcgacagaataacaattgcattgacccgacaacgacggacgccatgctggaggaaacctcatccgtctcatctgcttcttcaacaacaacgtcgccctcatcatcgtcctcctccacatcagtgggaaaccactgctcgccatccatcctcaagaaccatccggatgcatccgcaactgctgcccccaatacagataagatacaattgaatctaatgttccccagtaatcaaacatactctctagtgatgggcccggagaccaaacaaccgagaacgtccaaacagaaacaaaatgcaccaccgccagcacaaacagaggataactcggtcacattcgcaccagataatattcagatcgcattgaatcaagaccaaaataccttgattcatttggatccagtgcccaattttaacgataaggcagatattaaaccttggttacagaagatattctacccgcaaggtattgaaatcgtcattgaaagatcggataatacaaaagtaatctttaaatgtaaagctgcaaagaagggaagaagttccaataaggataagaatcaagcttctgcctcggatcccaccgtgacaacgccgaatgttaatcatgtcttgttgaagaagaagaagaaaagatccgtttctaggttcaatatttgtccctttagaattagagcaacgtattcattaaagaggaagaagtggaatatcgtcgtcataaataacacacattctcatccattgaaatttaacccggattctgaggagtataagaagtttaaattgaaattgagggaagacggtgatttggaagccattaaaaaatttgatgaattggaatataagacaaggaaaaatctgcccattcaatcatctatgatcccctgtgattgtgggttaactaacgaaattcaaagttttaacatagtcttaccttcgggaagaactgccgctaatagtaatgataccgcaacagcaacatctagtcgtccgattaaaaaattgttaagtgcaaacttaatttcaacaagcaatggtggcaacaacaataacgtgcaaaaaccaagaactagggtaaatgataagagaaataaggaaaatcttttgaaaaagacaaccacaacaaatttcttaactaataacggcacagcaccagccataccgactaatagggttaacagcctggtggaaaattcaaattcaatgacagatttcttagatgacccatttaattcctccatgaatattcccatgaacgattttgcaccatttaatttggaagcagtaactaatcttaatgaaattgattttaccgatattttcaataaaccaacaactttacaacaagatgatggaccattttcaacacttaacgaaatgcatattcacgaccaacaaacaccatatgctgcagatatgtctattttttcatcattagatactgccagtttaacaagattccaatctccaatgcatgatgtgaatgattcaccactacttcgaaatccatccaacacaacaaactcagaaatgttagattatatgtcaaatcaacatacaacgcaggaaaacaacgtgatacccaataatggtaataacaataacaacactacattggcaaacgaactggatgttttcaaaatggtggatggtgaattgaaaattatagaagatgataacgctttattaaagattaattcaacgacaggaaggcatgataatccagaaatgactaatacttccaatgaacataatccatacatgttccatgcatcccccgctgttcaagctgaaggacaattttggcaaaataatattaccaacaacgactcgataaacattacatcatccatgaatcagataactgacaatacaacaaacactaattcaaacatacaatccatcaatatgcaactcatagagttgaataatacttcgaaaaagtacgatgaccacaacaacaacaacaataacaacatcaacagccataatcataataatagtaattag

SEQ ID NO: 24 - protein, 670 aa, Saccharomyces castelli
MSRQNNNCIDPTTTDAMLEETSSVSSASSTTTSPSSSSSSTSVGNHCSPSILKNHPDASATAAPNTDKIQLNLMFPSNQTYSLVMGPETKQPRTSKQKQNAPPPAQTEDNSVTFAPDNIQIALNQDQNTLIHLDPVPNFNDKADIKPWLQKIFYPQGIEIVIERSDNTKVIFKCKAAKKGRSSNKDKNQASASDPTVTTPNVNHVLLKKKKKRSVSRFNICPFRIRATYSLKRKKWNIVVINNTHSHPLKFNPDSEEYKKFKLKLREDGDLEAIKKFDELEYKTRKNLPIQSSMIPCDCGLTNEIQSFNIVLPSGRTAANSNDTATATSSRPIKKLLSANLISTSNGGNNNNVQKPRTRVNDKRNKENLLKKTTTTNFLTNNGTAPAIPTNRVNSLVENSNSMTDFLDDPFNSSMNIPMNDFAPFNLEAVTNLNEIDFTDIFNKPTTLQQDDGPFSTLNEMHIHDQQTPYAADMSIFSSLDTASLTRFQSPMHDVNDSPLLRNPSNTTNSEMLDYMSNQHTTQENNVIPNNGNNNNNTTLANELDVFKMVDGELKIIEDDNALLKINSTTGRHDNPEMTNTSNEHNPYMFHASPAVQAEGQFWQNNITNNDSINITSSMNQITDNTTNTNSNIQSINMQLIELNNTSKKYDDHNNNNNNNINSHNHNNSN

SEQ ID NO: 25 - DNA, 1557 bp, Kluyveromyces waltii
atggatccgtcaccgatggatgcgttccagggcgaactactacagacatcaccgtcgctagattatctgctggcagaagattctcccttgtcgacagtcgatactattgggacaggggttacgagtaatacggaaagcagcggcaccgatataacgaacggcacacctggatggggcgagacagtgaatctcgaaaacctaatgagcgaaaaagcgctggagtccatcggcatgcaacgctcccagaacaagctgattcacttggacccgataccgaacttccaggaccgcaacgaaataaagccgtggcttcaaaagatcttctacccacaaggtatcgaaatagtgattgagcgttctgacaatatcaaggttgttttcaaatgcaaggcctcaaggcgaggcaagacatcccggaggcgaaatggatacggtcccattgcggaagaaaaggagaacccggaaaaccctctggcggtacaaagggtacagcagcaatcgtgcaagaagaagagatctgtttcaccatacaacacatgcccgttcagggtgcgagcgacttactcgctcaagcggaagaagtggaacattgttgtgatgaacaatggacactcgcacccgcttaaatttaatgccgacagtgatgactacaaaaagtttaaaaattatttgcgagagcacgaagactgggaggcggtcaaaaaattcgatgagttagagtgcagaacacgtttcaatttaccaactgagccccagcctataccgtgtgactgtgggctgactcaggagattgaaagtttcaatattgtactccctacgtccgattccatggccaactcaactgataaaacggtaagtaagccgcgtcataagtcgtcgcgaaagagcaatagccacattgccacggccttgagccgacatccgacaccactagaggtcctaggtagatcttcaccacaattggcacaagcaggaactgagcctcagtccatcaaagtggaaacccccacgcacaattcggaatcgaacgtgatgggtatgcagtcagtacaagcctttgatgcatccctatcggccctcgacgcatctctgtcaacatgggaacctaacgcccttcctaatcaatcagaggagattgactttacagatttattcctcaatcctttaacacgcatgaaacatgagccgatgaccggctcctcgcgggaattaccatggactgcgacaactaagcagttcatggatgaatttcaattcccactgtcaccagcacccgtatgtgaaatcaatcacaccgaccattgcaactgccttatgccatcatctacggatggactcgggcgagattcgccgcatgactttcatcaacgcattcaacaacaaggccgtatggaatctcgcagctctccagctggcgcggtcctaactgcagacctaaataacttgcatctcacgggccagcagcatatgcaaacgtcaaacctggatcagggtgtggcatggaaccaccaacacagtgacgaccctcatgaatatagtaatgattttttgccttaa

SEQ ID NO: 26 - protein, 518 aa, Kluyveromyces waltii
MDPSPMDAFQGELLQTSPSLDYLLAEDSPLSTVDTIGTGVTSNTESSGTDITNGTPGWGETVNLENLMSEKALESIGMQRSQNKLIHLDPIPNFQDRNEIKPWLQKIFYPQGIEIVIERSDNIKVVFKCKASRRGKTSRRRNGYGPIAEEKENPENPLAVQRVQQQSCKKKRSVSPYNTCPFRVRATYSLKRKKWNIVVMNNGHSHPLKFNADSDDYKKFKNYLREHEDWEAVKKFDELECRTRFNLPTEPQPIPCDCGLTQEIESFNIVLPTSDSMANSTDKTVSKPRHKSSRKSNSHIATALSRHPTPLEVLGRSSPQLAQAGTEPQSIKVETPTHNSESNVMGMQSVQAFDASLSALDASLSTWEPNALPNQSEEIDFTDLFLNPLTRMKHEPMTGSSRELPWTATTKQFMDEFQFPLSPAPVCEINHTDHCNCLMPSSTDGLGRDSPHDFHQRIQQQGRMESRSSPAGAVLTADLNNLHLTGQQHMQTSNLDQGVAWNHQHSDDPHEYSNDFLP

SEQ ID NO: 27 - DNA, 1911 bp, Saccharomyces kluyveri
atgaatcacttcgtagacaactctcctatggatccactgccaaatgatatatgggaacaatctccatcgttggagtccatgctaatgtctccttccgtttcttccagctcgacgaccaataaccaggcttgcacgccgactgggcttacaatcagcagcaacgaaacaacgatgagcaatgccagctataaccatgccttgagtgaaaacgctatagagtcggtaaagcgccaacaaaatcagaacaagctcatccacttggaccctatccctgattttaatgacaaaaacgagattaaaccctggttacagaaaatcttttatccccagggcatagagattgtcatcgagagatcagacaatatcaagattattttcaaatgcaaagcatcgaaaagaggtaagaaaaccagaaagtctgccttctgcggcccagatgatcctgggaacgaagatgaaaagagcctgcttgtacagagtctgacgaatagtaataacaacagcacctcgtcatccaatagcacaaagaaaaaaagatcggtctctccttacaatacatgcccatttaggattagagccacattttctctaaaaagacagaagtggaatatcgtcgtaataaacaatggccattctcatcctttgaaatttaacccggaaagtgaagactataagaaattcaaaaacaagctgagggaagatggcgattgggatgctgtaaagaaatttgacgagttggagtatagaacaaagtttaacttacccactgaaccgacgcctatatcttgtgattgtgggctgactcaagagatagaaagtttcaatgtcattttaccaagtgtaaacgcccaactcccttctctcccctcacaaaatgcatgtactgctaattcaaccgacaagaccgtggccaaacccaaaaaaaatcttgcaaagaagagcaggaagtctattactgccactggtagtagtggcagtatcaacactagatcattcaagaggaagagcacaaaggatttactgacacacgacatacaaagcaataagagtacatctacaacgagaactactacaccaatgaacgcatccctacagaacccctttacaagtacgagttttattgacggaaacgaaatcgattttacagaatttttgaaaccgttgcctcacttcaagcatttgcacggccaagccgacaccggcaacagcgttctcccgacccatcattcaaataattggtcacagcctgctccagcacaacaatggtcattaaataatctggtatcttcaccggttacacaaacagtgcatccccaaggcccgatagactttatgatgtttaatcagcaccaatcaatttcaccagacctccaaagcccagtgcatatgacgagttcgggtaatatacacacacaaacccactcacataccccgtctttgcagaatttacctgactttatgtcctttatctcggagcaccaacaaccactaaattttcagcatgtcccacagcatcagcaacaactacaacagcacaaaaatgtcagtatcgatgacttggatagaacaagcgtttcagtgacgactaccccaatgtgtgaagtaaataatagccatacttgtcaaagcgattgcatggaattaaaatccaccaacgcagtaaatgcacagcacaatttgtctcacaacttaacacaggtcgtcgatactcaaaatcaagcccaagatcaaaacactttgattggcagtgtgctgaatacagaacttagcaacatgagaatcattgatggtcagttacacgttgtagaagaagaaagaagtactgtggagccagagaatctgacgaaaaatacgagcgatcaacagtccaatttatttccatgggatggaacacagggcttctttggttaa

SEQ ID NO: 28 - protein, 636 aa, Saccharomyces kluyveri
MNHFVDNSPMDPLPNDIWEQSPSLESMLMSPSVSSSSTTNNQACTPTGLTISSNETTMSNASYNHALSENAIESVKRQQNQNKLIHLDPIPDFNDKNEIKPWLQKIFYPQGIEIVIERSDNIKIIFKCKASKRGKKTRKSAFCGPDDPGNEDEKSLLVQSLTNSNNNSTSSSNSTKKKRSVSPYNTCPFRIRATFSLKRQKWNIVVINNGHSHPLKFNPESEDYKKFKNKLREDGDWDAVKKFDELEYRTKFNLPTEPTPISCDCGLTQEIESFNVILPSVNAQLPSLPSQNACTANSTDKTVAKPKKNLAKKSRKSITATGSSGSINTRSFKRKSTKDLLTHDIQSNKSTSTTRTTTPMNASLQNPFTSTSFIDGNEIDFTEFLKPLPHFKHLHGQADTGNSVLPTHHSNNWSQPAPAQQWSLNNLVSSPVTQTVHPQGPIDFMMFNQHQSISPDLQSPVHMTSSGNIHTQTHSHTPSLQNLPDFMSFISEHQQPLNFQHVPQHQQQLQQHKNVSIDDLDRTSVSVTTTPMCEVNNSHTCQSDCMELKSTNAVNAQHNLSHNLTQVVDTQNQAQDQNTLIGSVLNTELSNMRIIDGQLHVVEEERSTVEPENLTKNTSDQQSNLFPWDGTQGFFG

SEQ ID NO: 29 - DNA, 2310 bp, Kluyveromyces marxianus
atggcgattaagcaagagatgggtgcgtctagcggtttggacccgctggaccctctggacccgctttcgaatgcggagttttggcacgcatctccttcttttgagatgatgaattcgccgaaggtgtcacctgcgagcactgtgatgacgcatacgcctagtgtgggcgggcagcagagtagcaacagcgaggtttcgtacaataatgttctgagtgagaatgcgatagaggcattgcagaagcaacaggaccagaacaagttgatccacttggacccgattcctgacttcaaggacaagagcgaggtgaagccgtggctccagaagatattttatccgcaggggatcgagattgtgattgagcggtcggacagcatgaagattgtgttcaagtgcaaggctgtgaagaaggcgaggagcggggttgcggctgcggcggccgcggcgtcttcgggttctggggtagcggggagttccggccacttcctagggtgtgcgtacgtgggcatgaacacgaatccgatgttgaataagggttcgagtaagaagaaggatggcagcggtaataatgccaggtgcaaggacgagaagtgcggcggcgatgggtcgtgtgaaaatagcggcgctaacgtcgacgctaatgctgcggaaaatgctaatgctagtaatagtaccacatccacgggcaaaaagaagagggtcactggtccatacaactcgtgtcccttcagagtgcgagctactttctcgttgaaaaggaagaagtggaacatcgtggtgattaacaacgtgcacacccacccgctacggttcaatcccgacagcgaggactacaaaaaatttaaaaagggtctatacgacagcggcgatatcgagacggtcaagaaattcgacgagctcgaatacagaactaaatcgaacctgcctatcgatttgagccctatcccatgtgactgtggtctaacacaggaaatccagtcctttaatatcgtccttccaacaacaaacattatagcatcaaccagcagagctggttcttctgatgcaaacactgtgtcaaagccaaagaagtgtaaaaactctttgaagaagaaatcaaaaaaattgaggctaaagaatacaaaacaaaagttgcaacaggatatcgaaagcaacagcgctcatacttccgctacaggaacgccattaggaaatgtaccaaatacactgaacctccaatttgacgtcaacatggacttgggtgtacagtccacttctggatcaaatatgaattcaagcgtggtattaacccctcaagaaaacatatattcgcatgatttcttccccaacacagcttcatcgcaacgtaatgactcaccaaacttttcaaatctaaacccaagctactttaacactgagaatgaaattgacttcacggagctatttagcaaaccattacctcatttcaaaaacaatcagcaacctgtaccccaatcacaggatgctattccactctcgttttctcataaaccatcaaacagtggtattccggacacccatcattctcaggcccaaggcaggcatatgttataccagaacgttgattctacaccatctactcattcatcacctagtatgaatgtaatgaccacaggaaagaattctatgacaatcacaccagctcttaacacagctacagcagcaacaggacccactcagagttccgtgccattgtactcatcggatatatctaaggaacaaattcaagatttcgttgacatgaatcaaattttcggcacctccgaatattctaaagaccgtaattctaactcaaataccccgaactctgtgatcccaggacggtcattaaactttcaacattctagattaccaacttcaaatcaacatcagaatcaaagtgctatttgtgaaataaataactatgatgtctgtgcaaatgactttggacaatgtggcggtgtcggcgctggtgtcgaaaccaattcacatagtaatactaacagtattactttgacgactagttctatgggtaatggtatcaactcgagcgtccatggttatgatattccaattaaaacagagttaacttcaaacccacaggagtatatctctaatgtactgaatacggattttaacgaacttaaactttcccaagatgaacaacatcagcaacaaggtggcatgaacaacctcggttctcaatcaaattacaactaccagttaatgttcgatgaggagttaaatcaacctcaacaaacaacgcataaccctcacaccctgtgggaagaacctcatggattccttcagtga

SEQ ID NO: 30 - protein, 769 aa, Kluyveromyces marxianus
MAIKQEMGASSGLDPLDPLDPLSNAEFWHASPSFEMMNSPKVSPASTVMTHTPSVGGQQSSNSEVSYNNVLSENAIEALQKQQDQNKLIHLDPIPDFKDKSEVKPWLQKIFYPQGIEIVIERSDSMKIVFKCKAVKKARSGVAAAAAAASSGSGVAGSSGHFLGCAYVGMNTNPMLNKGSSKKKDGSGNNARCKDEKCGGDGSCENSGANVDANAAENANASNSTTSTGKKKRVTGPYNSCPFRVRATFSLKRKKWNIVVINNVHTHPLRFNPDSEDYKKFKKGLYDSGDIETVKKFDELEYRTKSNLPIDLSPIPCDCGLTQEIQSFNIVLPTTNIIASTSRAGSSDANTVSKPKKCKNSLKKKSKKLRLKNTKQKLQQDIESNSAHTSATGTPLGNVPNTLNLQFDVNMDLGVQSTSGSNMNSSVVLTPQENIYSHDFFPNTASSQRNDSPNFSNLNPSYFNTENEIDFTELFSKPLPHFKNNQQPVPQSQDAIPLSFSHKPSNSGIPDTHHSQAQGRHMLYQNVDSTPSTHSSPSMNVMTTGKNSMTITPALNTATAATGPTQSSVPLYSSDISKEQIQDFVDMNQIFGTSEYSKDRNSNSNTPNSVIPGRSLNFQHSRLPTSNQHQNQSAICEINNYDVCANDFGQCGGVGAGVETNSHSNTNSITLTTSSMGNGINSSVHGYDIPIKTELTSNPQEYISNVLNTDFNELKLSQDEQHQQQGGMNNLGSQSNYNYQLMFDEELNQPQQTTHNPHTLWEEPHGFLQ

SEQ ID NO: 31 - DNA, 1494 bp, Issatchenkia orientalis
atgacgcactccgactcggggttacacaagaatccttcaatgaggtgtgaagcttcaccaagtaactttggatccgaatttgaagatggaatgtcgcatggagtacaatcctgtgatgcccctgataggggaatgtatacaacttcgtattgtcccatcaaggataccattatgatgcacaagtcgtcatcacaagcgtcatcacaagcgtcatcacaagcgtcatcacaagtgccatcacaagtgccatcacaagcgtcatcacaagcttcatcacaagcgtcctcctcgtgttgctccacaaattcggctccctgctcccctacttcaccattgattctatcgagtgaggggagagaaaataaggtacattgttccaacagcatgacaaagttgaagttggaaaatcgccatttcaccaacaaggcagacattaagccatggttacagagaaacctggcctccatggggatccatattgtaattgagagatcagatgatacaaagattgtcttcaaatgcaagtattcggacaagaagccactggagaaaaataactgcaaatcccatgagagagcagctaggcagcggaaaaagaaggtttgcccctttagaatcagggccaactattccattcgatccaaacactggacattggttatagtcaatgattctcataatcaccctatttccagtttggacgtcaatatagctgatattaagtccaaattgtcgataattgaccagaaaaaatcaaatcatcgggttactaagccgaaaagtttgaaacataaagaccatttgccagtacctcgagcctttgccattgacccctcaaatgctttatcgtcaacttctctgacttgcaaaccttatcataatagtctcatacctccaatattaaatgaaaatacacatgcaaaggttaaactccctcccatctcattgccagataactcattgaataaccaagttagacaaattgaagatactttgaaaaccttccaacaggttggtaatatacccaatgtttcaaaagaaaaaatcttaaaggatgtctggtgcgtcttgaataaatcaatcaatgaaatcaccgactccaattcagggagctttcctctaccattacccctaccgttaccacaccaaaaaatgggcagagtatctcaaagacaatctttccaattgttcaatactaataacaacattgagaataatgttattaatggcaatctcgaaaatagcaacactagcagccgaagcagcagcaacagtatcaacgacatcaacgacatcaacgacatcaacgacatcaacttggctagtaataacatgtacttgaataactatgctaaaagcaatacctttacatctccacatttcaagcttccaagataccaattttcaaatgcatctcttggaccactgataaaatctgcccatgatcgaaacatcagtttgccaagtatccgaaacctagactcaggcgcctag

SEQ ID NO: 32 - protein, 497 aa, Issatchenkia orientalis
MTHSDSGLHKNPSMRCEASPSNFGSEFEDGMSHGVQSCDAPDRGMYTTSYCPIKDTIMMHKSSSQASSQASSQASSQVPSQVPSQASSQASSQASSSCCSTNSAPCSPTSPLILSSEGRENKVHCSNSMTKLKLENRHFTNKADIKPWLQRNLASMGIHIVIERSDDTKIVFKCKYSDKKPLEKNNCKSHERAARQRKKKVCPFRIRANYSIRSKHWTLVIVNDSHNHPISSLDVNIADIKSKLSIIDQKKSNHRVTKPKSLKHKDHLPVPRAFAIDPSNALSSTSLTCKPYHNSLIPPILNENTHAKVKLPPISLPDNSLNNQVRQIEDTLKTFQQVGNIPNVSKEKILKDVWCVLNKSINEITDSNSGSFPLPLPLPLPHQKMGRVSQRQSFQLFNTNNNIENNVINGNLENSNTSSRSSSNSINDINDINDINDINLASNNMYLNNYAKSNTFTSPHFKLPRYQFSNASLGPLIKSAHDRNISLPSIRNLDSGA

SEQ ID NO: 33 - DNA, 1434 bp, Issatchenkia orientalis
atgacgcactccgactcggggttacacaagaatccttcaatgaggtgtgaagcttcaccaagtaactttggatccgaatttgaagatggaatgtcgcatggagtacaatcctgtgatgcccctgataggggaatgtatacaacttcgtattgtcccatcaaggataccattatgatgcacaagtcgtcatcacaagcgtcatcacaagcttcatcacaagcgtcctcctcgtgttgctccacaaattcggctccctgctcccctacttcaccattgattctatcgagtgaggggagagaaaataaggtacattgttccaacagcatgacaaagttgaagttggaaaatcgccatttcaccaacaaggcagacattaagccatggttacagagaaacctggcctccatggggatccatattgtaattgagagatcagatgatacaaagattgtcttcaaatgcaagtattcggacaagaagccactggagaaaaataactgcaaatcccatgagagagcagctaggcagcggaaaaagaaggtttgcccctttagaatcagggccaactattccattcgatccaaacactggacattggttatagtcaatgattctcataatcaccctatttccagtttggacgtcaatatagctgatattaagtccaaattgtcgataattgaccagaaaaaatcaaatcatcgggttactaagccgaaaagtttgaaacataaagaccatttgccagtacctcgagcctttgccattgacccctcaaatgctttatcgtcaacttctctgacttgcaaaccttatcataatagtctcatacctccaatattaaatgaaaatacacatgcaaaggttaaactccctcccatctcattgccagataactcattgaataaccaagttagacaaattgaagatactttgaaaaccttccaacaggttggtaatatacccaatgtttcaaaagaaaaaatcttaaaggatgtctggtgcgtcttgaataaatcaatcaatgaaatcaccgactccaattcagggagctttcctctaccattacccctaccgttaccacaccaaaaaatgggcagagtatctcaaagacaatctttccaattgttcaatactaataacaacattgagaataatgttattaatggcaatctcgaaaatagcaacactagcagccgaagcagcagcaacagtatcaacgacatcaacgacatcaacgacatcaacgacatcaacttggctagtaataacatgtacttgaataactatgctaaaagcaatacctttacatctccacatttcaagcttccaagataccaattttcaaatgcatctcttggaccactgataaaatctgcccatgatcgaaacatcagtttgccaagtatccgaaacctagactcaggcgcctag

SEQ ID NO: 34 - protein, 477 aa, Issatchenkia orientalis
MTHSDSGLHKNPSMRCEASPSNFGSEFEDGMSHGVQSCDAPDRGMYTTSYCPIKDTIMMHKSSSQASSQASSQASSSCCSTNSAPCSPTSPLILSSEGRENKVHCSNSMTKLKLENRHFTNKADIKPWLQRNLASMGIHIVIERSDDTKIVFKCKYSDKKPLEKNNCKSHERAARQRKKKVCPFRIRANYSIRSKHWTLVIVNDSHNHPISSLDVNIADIKSKLSIIDQKKSNHRVTKPKSLKHKDHLPVPRAFAIDPSNALSSTSLTCKPYHNSLIPPILNENTHAKVKLPPISLPDNSLNNQVRQIEDTLKTFQQVGNIPNVSKEKILKDVWCVLNKSINEITDSNSGSFPLPLPLPLPHQKMGRVSQRQSFQLFNTNNNIENNVINGNLENSNTSSRSSSNSINDINDINDINDINLASNNMYLNNYAKSNTFTSPHFKLPRYQFSNASLGPLIKSAHDRNISLPSIRNLDSGA

SEQ ID NO: 35 - DNA, 1203 bp, Saccharomyces bayanus
atgtcaaaaacaggaaagatgaggttgacggcatctcctgataacctagcgtctatgatgtctagagaccaaaacaagcttattcatctggacccggtcccatttttcaaagacagacatgaaatcaaaccatggttacaaaagatcttttatccccagggaatagatatagtcattgaaaggtcagattctggcaaagtcacttttaaatgtagatcagtacgatccaacgggaggctgaatcctgaatccaaaggcacctcttcaaggtcgcatgcatgtccatttagaatcagagccgccttctctgtacggttacagaagtggaatgtggttgtcatgaataatatacatgcgcacgagctgaggtttgatctaatcactaaaacagatgactataaaaaatttaaagaaacccttcgccagaaacatgacgaaaaggcaatcaaaacctttgatgaactagaatacaaggccagcctaaacttaccgctcgtgacaccgattatctcctgtgactgtggtctgaccaaagaaattgaagctttcaataatatatatcttccgatatcaaatccttctttgacgtctaaaaaaagtatactcaaggctaataaaaattctgtgtctaaggtaaaacctaaacaaccggaaaattcaaagcctgggctgaggttgaaaacacaattagattcaactctgaatgcaaccagatttttggatgacatcaaagtacaaagcgctcttgtatcgacaggaagtgccgagtcactaatgaacttgaacgaaatcgacttcaccaatatgtttaataacgatagtgctattccaaatcccaatcaaggactgatggatttctcagtggatcccattgcaggaccttcctcttcttctctatttccttcaacgcccaccgagcctttttcacaaaacaacgtgccactagctatttcggagtcaataacatcttcttctccaaatttcatggaaatgaagacttcttatgaagatgaaatcatggagcttttcaaagataataaaagcaatgcaccaacttctgatacggatatcaatacagatttaggtaagggcataagcgatagttttggcatgttaaactataattacgaagcattgcttcactttaatgatgacgaatttagtgaattgaagtctatcgatccggcattgatatcaaagtaa

SEQ ID NO: 36 - protein, 400 aa, Saccharomyces bayanus
MSKTGKMRLTASPDNLASMMSRDQNKLIHLDPVPFFKDRHEIKPWLQKIFYPQGIDIVIERSDSGKVTFKCRSVRSNGRLNPESKGTSSRSHACPFRIRAAFSVRLQKWNVVVMNNIHAHELRFDLITKTDDYKKFKETLRQKHDEKAIKTFDELEYKASLNLPLVTPIISCDCGLTKEIEAFNNIYLPISNPSLTSKKSILKANKNSVSKVKPKQPENSKPGLRLKTQLDSTLNATRFLDDIKVQSALVSTGSAESLMNLNEIDFTNMFNNDSAIPNPNQGLMDFSVDPIAGPSSSSLFPSTPTEPFSQNNVPLAISESITSSSPNFMEMKTSYEDEIMELFKDNKSNAPTSDTDINTDLGKGISDSFGMLNYNYEALLHFNDDEFSELKSIDPALISK

SEQ ID NO: 37 - DNA, 2205 bp, Saccharomyces castelli
atgaatggagacaataaaggaacgagtggatcttcaccatttgggaactttagcgaaagtgcattcaattctggagctaaccaaacggctaccgctggacaagacaccaaaaataagccatcgacctccatgttcggtaatactgctaaaactggaacaactccaatgtttggttctacagggactgcgaataagggtgctttcacagggtttggtacagcctcatctacattcggtagtatggcaaacgcatcaacctcaaataccgatggaaagacaggcactacaggatttagctttggcaacgcagctaacgcaaaacctggggctgaaactgcaaccaatgactcaaataaaccaaatacctttgcacttggaaattcttccacgccagcttccggtactctctttggcaataaatctggatcaaccgccacaccaatgtttaacatgggaggtgcaacatctgctgataagatttctaacccagcctccaccttttcgtttggagcttctgacaagaaggatgattcgaagcctggattttcatttaatcaaaatacgggagggaaccaaccaagcaccacagaaacaaataaaccagcattctcctttggagcaacaagtgatggaaaagattctgctgctaagccaactttgagttttggaacagctccaggcacaaacgattctacaaaaccattctcttttggaacaagcactggagctaaagaatcaacatcgacacctgcttttactctgggaggagctaaagaggcacccaacacaactccttcattttcattaggaagcgctagtaacgacaaaaactctgcttcgaagcctgggtttacacttggtgcaacccttgggactcaaacagataaaaacaacactgaaacaaaacccgcctttagttttgcttccactcctacagaggatactaccaaaagtgcgtcatctatatcacttccttcaaataatggtgataccgccaaaccagctttttcattctcaagtaaatctacagaagataaatcaaccaatgaaagctctacaacaaaaccaaccctttctttcggggcaaaacctgaagttaaagagactacagatactaagtcatccacagttactatgccagcattttcttttggagagaaaccgagggagggtaccggtaatgcaccaactttttcattaggtaaaaaaccagaagaacaagataaagcagctgccgctccaagtttctcattgggcaaaaagtcagatgaaaatggtagtgcaactccagctccagcattttcatttggaaagaaacctgaagaaaaggcaaacgctacgtctgcaccaactttctctttagctaaaaaagcagacgaaaaagacagtacgactgctgctccagcgttttcatttggaaagaagtcagaagaaaaggattcagctgctaaggacacatcgacaaaaacaggtttctcatttggtaataaagctgacgagaagaagcccgagggtaccactctgaaaaaggaagatatcaaatctaacgtctccgaaaagacttttgaaaattctaccaagactggaggtcttgatacgaaaccagtggaactaaaaccagtttcacttgacaataagaccttggacgatctaataacaaaatggacaaatgacttaacaaaagcggctgttcacttcgatgagtattcaaagaagattaattcttgggatcagatgctagtaaagggcggtgaacaagtaagccagttatattctgacacattggctacggaacaaactcaaaatagaatagatcaatcgttacaatatattgaaaggcagcaggatgaattagagatatttttagataactatgaaagaaaggccgacactttattatctgacattttatcaacaactgctgtcaataccgcaagcaataacgaccagaagaggcaacaggcgtatcacactgcagaaactcttgatgaaaacttaagtgctctctcttcaaacctatcctcattgataaatgaaattaatgatgttagcaacagtttcaacaaggcaacaagtatcaatttaggaaacaaagatgaaaactctcaattgatgaaattattgaattcacatttagacgcattgaaatcgttagacgacaattcgtccttattagaacaaaaaatcaaatcattctctaaataa

SEQ ID NO: 38 - protein, 734 aa, Saccharomyces castelli
MNGDNKGTSGSSPFGNFSESAFNSGANQTATAGQDTKNKPSTSMFGNTAKTGTTPMFGSTGTANKGAFTGFGTASSTFGSMANASTSNTDGKTGTTGFSFGNAANAKPGAETATNDSNKPNTFALGNSSTPASGTLFGNKSGSTATPMFNMGGATSADKISNPASTFSFGASDKKDDSKPGFSFNQNTGGNQPSTTETNKPAFSFGATSDGKDSAAKPTLSFGTAPGTNDSTKPFSFGTSTGAKESTSTPAFTLGGAKEAPNTTPSFSLGSASNDKNSASKPGFTLGATLGTQTDKNNTETKPAFSFASTPTEDTTKSASSISLPSNNGDTAKPAFSFSSKSTEDKSTNESSTTKPTLSFGAKPEVKETTDTKSSTVTMPAFSFGEKPREGTGNAPTFSLGKKPEEQDKAAAAPSFSLGKKSDENGSATPAPAFSFGKKPEEKANATSAPTFSLAKKADEKDSTTAAPAFSFGKKSEEKDSAAKDTSTKTGFSFGNKADEKKPEGTTLKKEDIKSNVSEKTFENSTKTGGLDTKPVELKPVSLDNKTLDDLITKWTNDLTKAAVHFDEYSKKINSWDQMLVKGGEQVSQLYSDTLATEQTQNRIDQSLQYIERQQDELEIFLDNYERKADTLLSDILSTTAVNTASNNDQKRQQAYHTAETLDENLSALSSNLSSLINEINDVSNSFNKATSINLGNKDENSQLMKLLNSHLDALKSLDDNSSLLEQKIKSFSK

SEQ ID NO: 39 - protein, 40 aa, Artificial Sequence
  2Fe-2S cluster protein motif
  MISC_FEATURE (2)..(5): Xaa may be any amino acid
  MISC_FEATURE (7)..(8): Xaa may be any amino acid
  MISC_FEATURE (10)..(39): Xaa may be any amino acid
CXXXXCXXCXXXXXXXXXXXXXXXXXXXXXXXXXXXXXXC

SEQ ID NO: 40 - DNA, 1716 bp, Bacillus subtilis
atgttgactaaagctacaaaagagcagaaatcattggtgaaaaataggggtgcagaacttgttgtggactgtttggtagaacagggcgtaacacatgtttttggtatcccaggtgcaaaaatcgacgccgtgtttgatgcattacaagacaagggtccagaaattattgttgctagacatgagcaaaatgccgcatttatggcgcaagctgtaggtaggcttacaggtaaacctggtgttgtcctagttacgtctggcccaggagcctccaatttagcaactggtctattgacagctaatactgagggagatcctgtagttgcgttagccggtaatgtaattagagctgataggcttaagagaactcaccagtctctagacaacgctgctttattccaaccgatcaccaagtactcagtagaggtacaagacgtaaagaatatacctgaagctgtgacaaacgcatttcgtatagcttctgctggtcaggctggtgccgcgtttgtttcttttcctcaagacgttgtcaatgaagtgaccaatactaaaaacgttagagcggttgcagcccctaaactaggtccagccgcagacgacgcaattagcgctgcaattgctaaaattcagacggcgaaactaccagtagtccttgtcggtatgaagggcggaagaccagaagcaataaaagctgttcgtaagttattgaagaaagtccaattacctttcgttgagacttaccaagcagcaggtactttatctagagatttagaggatcagtattttggaaggataggtctatttagaaaccaaccaggagatttactattagaacaagctgatgttgtacttactatcggttatgatcctatagagtatgacccaaagttttggaacataaatggggatagaacaattatacatctagacgagataatcgccgacatcgatcacgcttatcaaccagatttagaactaatcggagatatcccgtcaacaatcaatcatattgaacatgatgctgtaaaggttgagttcgctgaacgtgagcagaaaatcttatctgatctaaagcaatatatgcatgagggtgaacaagttccagcagactggaaatctgaccgtgcacatcctttggaaatcgttaaggaactaagaaatgcggtcgatgatcatgtgactgttacatgtgatatcggttcacatgcaatttggatgtcacgttattttaggagctacgaaccattaactttaatgatatctaacgggatgcaaactctgggggttgcacttccttgggctattggcgctagtttagttaagcccggtgagaaggtggtatcggtatcaggtgatggtggctttctgttttcggctatggaattagaaactgcagtccgtttaaaagctcccattgtgcatattgtctggaatgattctacttacgacatggttgcttttcaacagttgaagaaatacaatagaacttcggctgtagactttggtaacatcgatattgtgaaatatgctgagtcttttggcgcaacaggcctgagggtggaaagtccagatcagttagctgatgtgttgagacaagggatgaatgccgagggaccggtaatcatagatgtgccagttgactactcagacaatattaatttggcttctgataaacttcctaaagagtttggcgagctaatgaagaccaaagccttataa

SEQ ID NO: 41 - protein, 571 aa, Bacillus subtilis
MLTKATKEQKSLVKNRGAELVVDCLVEQGVTHVFGIPGAKIDAVFDALQDKGPEIIVARHEQNAAFMAQAVGRLTGKPGVVLVTSGPGASNLATGLLTANTEGDPVVALAGNVIRADRLKRTHQSLDNAALFQPITKYSVEVQDVKNIPEAVTNAFRIASAGQAGAAFVSFPQDVVNEVTNTKNVRAVAAPKLGPAADDAISAAIAKIQTAKLPVVLVGMKGGRPEAIKAVRKLLKKVQLPFVETYQAAGTLSRDLEDQYFGRIGLFRNQPGDLLLEQADVVLTIGYDPIEYDPKFWNINGDRTIIHLDEIIADIDHAYQPDLELIGDIPSTINHIEHDAVKVEFAEREQKILSDLKQYMHEGEQVPADWKSDRAHPLEIVKELRNAVDDHVTVTCDIGSHAIWMSRYFRSYEPLTLMISNGMQTLGVALPWAIGASLVKPGEKVVSVSGDGGFLFSAMELETAVRLKAPIVHIVWNDSTYDMVAFQQLKKYNRTSAVDFGNIDIVKYAESFGATGLRVESPDQLADVLRQGMNAEGPVIIDVPVDYSDNINLASDKLPKEFGELMKTKAL

SEQ ID NO: 42 - DNA, 1476 bp, Artificial Sequence
  Nucleotide sequence for E. coli ilvCQ110V
atggccaactattttaacacattaaatttgagacaacaattggctcaactgggtaagtgcagatttatgggaagggacgagtttgctgatggtgcttcttatctgcaaggaaagaaagtagtaattgttggctgcggtgctcagggtctaaaccaaggtttaaacatgagagattcaggtctggatatttcgtatgcattgaggaaagaggcaattgcagaaaagagggcctcctggcgtaaagcgacggaaaatgggttcaaagttggtacttacgaagaactgatccctcaggcagatttagtgattaacctaacaccagataaggttcactcagacgtagtaagaacagttcaaccgctgatgaaggatggggcagctttaggttactctcatggctttaatatcgttgaagtgggcgagcagatcagaaaagatataacagtcgtaatggttgcaccaaagtgcccaggtacggaagtcagagaggagtacaagaggggttttggtgtacctacattgatcgccgtacatcctgaaaatgaccccaaaggtgaaggtatggcaattgcgaaggcatgggcagccgcaaccggaggtcatagagcgggtgtgttagagagttctttcgtagctgaggtcaagagtgacttaatgggtgaacaaaccattctgtgcggaatgttgcaggcagggtctttactatgctttgataaattggtcgaagagggtacagatcctgcctatgctgaaaagttgatacaatttggttgggagacaatcaccgaggcacttaaacaaggtggcataacattgatgatggatagactttcaaatccggccaagctaagagcctacgccttatctgagcaactaaaagagatcatggcaccattattccaaaagcacatggacgatattatctccggtgagttttcctcaggaatgatggcagattgggcaaacgatgataaaaagttattgacgtggagagaagaaaccggcaagacggcattcgagacagccccacaatacgaaggtaaaattggtgaacaagaatactttgataagggagtattgatgatagctatggtgaaggcaggggtagaacttgcattcgaaactatggttgactccggtatcattgaagaatctgcatactatgagtctttgcatgaattgcctttgatagcaaatactattgcaagaaaaagactttacgagatgaatgttgtcatatcagacactgcagaatatggtaattacttatttagctacgcatgtgtcccgttgttaaagcccttcatggccgagttacaacctggtgatttggggaaggctattccggaaggagcggttgacaatggccaactgagagacgtaaatgaagctattcgttcacatgctatagaacaggtgggtaaaaagctgagaggatatatgaccgatatgaaaagaattgcagtggcaggatga

SEQ ID NO: 43 - protein, 493 aa, Artificial Sequence
  Amino acid sequence for E. coli ilvCQ110V
MANYFNTLNLRQQLAQLGKCRFMGRDEFADGASYLQGKKVVIVGCGAQGLNQGLNMRDSGLDISYALRKEAIAEKRASWRKATENGFKVGTYEELIPQADLVINLTPDKVHSDVVRTVQPLMKDGAALGYSHGFNIVEVGEQIRKDITVVMVAPKCPGTEVREEYKRGFGVPTLIAVHPENDPKGEGMAIAKAWAAATGGHRAGVLESSFVAEVKSDLMGEQTILCGMLQAGSLLCFDKLVEEGTDPAYAEKLIQFGWETITEALKQGGITLMMDRLSNPAKLRAYALSEQLKEIMAPLFQKHMDDIISGEFSSGMMADWANDDKKLLTWREETGKTAFETAPQYEGKIGEQEYFDKGVLMIAMVKAGVELAFETMVDSGIIEESAYYESLHELPLIANTIARKRLYEMNVVISDTAEYGNYLFSYACVPLLKPFMAELQPGDLGKAIPEGAVDNGQLRDVNEAIRSHAIEQVGKKLRGYMTDMKRIAVAGLE

SEQ ID NO: 44 - DNA, 1476 bp, Artificial Sequence
  Nucleotide sequence for E. coli ilvC coScP2D1-A1
atggccaactattttaacacattaaatttgagacaacaattggctcaactgggtaagtgcagatttatgggaagggacgagtttgctgatggtgcttcttatctgcaaggaaagaaagtagtaattgttggctgcggtgctcagggtctaaaccaaggtttaaacatgagagattcaggtctggatatttcgtatgcattgaggaaagagtctattgcagaaaaggatgccgattggcgtaaagcgacggaaaatgggttcaaagttggtacttacgaagaactgatccctcaggcagatttagtgattaacctaacaccagataaggttcactcagacgtagtaagaacagttcaaccgctgatgaaggatggggcagctttaggttactctcatggctttaatatcgttgaagtgggcgagcagatcagaaaaggtataacagtcgtaatggttgcgccaaagtgcccaggtacggaagtcagagaggagtacaagaggggttttggtgtacctacattgatcgccgtacatcctgaaaatgaccccaaacgtgaaggtatggcaatagcgaaggcatgggcagccgcaaccggaggtcatagagcgggtgtgttagagagttctttcgtagctgaggtcaagagtgacttaatgggtgaacaaaccattctgtgcggaatgttgcaggcagggtctttactatgctttgataaattggtcgaagagggtacagatcctgcctatgctgaaaagttgatacaatttggttgggagacaatcaccgaggcacttaaacaaggtggcataacattgatgatggatagactttcaaatccggccaagctaagagcctacgccttatctgagcaactaaaagagatcatggcaccattattccaaaagcacatggacgatattatctccggtgagttttcctcaggaatgatggcagattgggcaaacgatgataaaaagttattgacgtggagagaagaaaccggcaagacggcattcgagacagccccacaatacgaaggtaaaattggtgaacaagaatactttgataagggagtattgatgatagctatggtgaaggcaggggtagaacttgcattcgaaactatggttgactccggtatcattgaagaatctgcatactatgagtctttgcatgaattgcctttgatagcaaatactattgcaagaaaaagactttacgagatgaatgttgtcatatcagacactgcagaatatggtaattacttatttagctacgcgtgtgtcccgttgttagagcccttcatggccgagttacaacctggtgatttggggaaggctattccggaaggagcggttgacaatggccaactgagagacgtaaatgaagctattcgttcgcatgctatagaacaggtgggtaaaaagctgagaggatatatgaccgatatgaaaagaattgcagtggcaggatga

SEQ ID NO: 45 - protein, 491 aa, Artificial Sequence
  Amino acid sequence for E coli IlvCP2D1-A1
MANYFNTLNLRQQLAQLGKCRFMGRDEFADGASYLQGKKVVIVGCGAQGLNQGLNMRDSGLDISYALRKESIAEKDADWRKATENGFKVGTYEELIPQADLVINLTPDKVHSDVVRTVQPLMKDGAALGYSHGFNIVEVGEQIRKGITVVMVAPKCPGTEVREEYKRGFGVPTLIAVHPENDPKREGMAIAKAWAAATGGHRAGVLESSFVAEVKSDLMGEQTILCGMLQAGSLLCFDKLVEEGTDPAYAEKLIQFGWETITEALKQGGITLMMDRLSNPAKLRAYALSEQLKEIMAPLFQKHMDDIISGEFSSGMMADWANDDKKLLTWREETGKTAFETAPQYEGKIGEQEYFDKGVLMIAMVKAGVELAFETMVDSGIIEESAYYESLHELPLIANTIARKRLYEMNVVISDTAEYGNYLFSYACVPLLEPFMAELQPGDLGKAIPEGAVDNGQLRDVNEAIRSHAIEQVGKKLRGYMTDMKRIAVAG

SEQ ID NO: 46 - DNA, 1647 bp, Lactococcus lactis
atgtatactgttggtgattatctgctggaccgtctgcatgaactgggtatcgaagaaatcttcggcgttccgggtgattacaatctgcagttcctggatcagatcatctctcataaagacatgaaatgggtgggtaacgctaacgaactgaacgcaagctacatggcagatggttatgcacgtaccaagaaagccgcggcatttctgaccactttcggtgttggcgaactgagcgccgtcaacggtctggcgggctcctacgccgaaaacctgccggtggtggagatcgtaggcagcccaacgagcaaagttcagaacgaaggtaaattcgtccaccacactctggctgacggcgatttcaaacacttcatgaaaatgcatgaacctgtgactgcggcacgtacgctgctgactgcagagaacgctactgtggaaatcgaccgcgttctgtctgcgctgctgaaagaacgcaaaccagtttacatcaacctgcctgtggatgttgcggcagctaaagcggaaaaaccgagcctgccgctgaagaaagaaaactccacttctaacactagcgaccaggaaatcctgaacaaaatccaggagtctctgaaaaacgcaaagaaaccaatcgtgatcaccggccacgaaatcatttcttttggtctggagaagaccgtgacccaattcatcagcaaaaccaaactgccgattaccaccctgaacttcggcaagtcctctgttgacgaggctctgccgtctttcctgggcatctacaacggtactctgagcgaaccgaacctgaaagaatttgttgaatctgcggacttcatcctgatgctgggcgttaaactgaccgactcttctaccggtgcattcactcaccatctgaacgaaaacaaaatgattagcctgaacatcgacgagggtaaaatcttcaacgagcgtatccagaacttcgacttcgaaagcctgatcagctctctgctggacctgtccgaaatcgagtataaaggcaaatacattgacaaaaagcaagaagatttcgtaccatctaacgcactgctgtcccaggatcgcctgtggcaggccgtggagaacctgacccagagcaatgaaaccatcgtggcggaacaaggtacgagctttttcggcgcgtcttctatctttctgaaatccaaaagccattttatcggtcagccgctgtggggtagcattggctatactttcccggcagcgctgggctctcagatcgctgataaagaatctcgtcatctgctgttcatcggtgacggttccctgcagctgaccgtacaggaactgggtctggcaattcgtgaaaagatcaacccgatttgcttcattattaacaatgacggctacaccgttgagcgtgagatccacggtccgaaccagtcttacaacgatatccctatgtggaactactctaaactgccggagtccttcggcgcaactgaggaccgtgttgtgtctaaaattgtgcgtaccgaaaacgaatttgtgagcgtgatgaaagaggcccaggccgatccgaaccgtatgtactggatcgaactgatcctggcgaaagaaggcgcaccgaaggtactgaagaaaatgggcaagctgtttgctgaacagaataaatcctaa

SEQ ID NO: 47 - protein, 548 aa, Lactococcus lactis
MYTVGDYLLDRLHELGIEEIFGVPGDYNLQFLDQIISHKDMKWVGNANELNASYMADGYARTKKAAAFLTTFGVGELSAVNGLAGSYAENLPVVEIVGSPTSKVQNEGKFVHHTLADGDFKHFMKMHEPVTAARTLLTAENATVEIDRVLSALLKERKPVYINLPVDVAAAKAEKPSLPLKKENSTSNTSDQEILNKIQESLKNAKKPIVITGHEIISFGLEKTVTQFISKTKLPITTLNFGKSSVDEALPSFLGIYNGTLSEPNLKEFVESADFILMLGVKLTDSSTGAFTHHLNENKMISLNIDEGKIFNERIQNFDFESLISSLLDLSEIEYKGKYIDKKQEDFVPSNALLSQDRLWQAVENLTQSNETIVAEQGTSFFGASSIFLKSKSHFIGQPLWGSIGYTFPAALGSQIADKESRHLLFIGDGSLQLTVQELGLAIREKINPICFIINNDGYTVEREIHGPNQSYNDIPMWNYSKLPESFGATEDRVVSKIVRTENEFVSVMKEAQADPNRMYWIELILAKEGAPKVLKKMGKLFAEQNKS

SEQ ID NO: 48 - DNA, 1713 bp, Lactococcus lactis
atggagtttaagtataacggcaaagttgaatctgttgaactgaataagtacagcaaaacgttgacacaagatcccacacaacccgccacacaggcaatgtattacggcatcgggtttaaagacgaagatttcaagaaagctcaagtgggtatagtgtcgatggactgggatggaaatccatgcaacatgcatttaggaacccttggatcaaagattaaaagctcagtaaatcagacagatggtctgatcggcttacaatttcatacgataggagtttctgatgggatagcaaatggaaagttgggaatgagatactcccttgtttccagagaagttatagctgactctattgaaaccaacgctggcgctgaatactatgatgcaattgtagccatcccaggttgtgacaaaaatatgccaggttctattattggtatggcaagacttaataggccaagcattatggtgtatggaggaacaatagaacacggtgaatataaaggtgagaaattgaacatcgtatcggcttttgaatctctaggccagaaaattaccggcaatatctctgatgaagattatcacggtgttatttgtaatgctattcctggtcaaggggcatgtggggggatgtacacagctaataccttagctgccgctatcgaaacactaggtatgtcattgccgtattcttcttcgaaccctgcagtatctcaagaaaaacaagaagaatgtgatgagattggattagccattaagaatcttttggaaaaagacatcaagcctagtgatataatgactaaggaggcgttcgagaacgctattaccattgtgatggtcttggggggtagtactaatgctgtcttgcatattattgcaatggctaacgcgataggtgtcgaaataactcaggatgacttccaaagaattagtgacattactccagtactaggtgattttaaaccttcaggtaaatatatgatggaagatttgcataaaattggaggcttgccagcagtgcttaagtaccttctaaaggaaggaaaattgcatggtgactgccttactgtgacgggtaaaacattagccgagaatgtcgagactgccctagacttggatttcgactcacaagatatcatgaggccactaaagaatcctatcaaggccaccggccacttgcagattctgtacggtaatttagctcaagggggttccgtagcaaaaattagcggtaaagaaggagagttcttcaaaggcactgccagagtctttgatggtgaacaacattttatcgacggcatagaatctggtcgtttgcatgctggagatgtagcggtaattaggaatataggtcccgtcggcggacctggtatgcccgaaatgctgaagcctacatcagcattaattggtgcgggtttagggaaaagttgcgcgttaattacggatggtagattctccggtggcactcacggttttgttgtcggccatattgtgcctgaagccgttgagggtggactaatcggcttagttgaagatgacgatataatagagatagatgcagtcaacaactctatatccctgaaagtttccgatgaagaaatcgcaaagagaagagctaattatcagaagccaactccgaaagccaccaggggagttttggcaaaattcgctaaattaacccgtcctgcatcggaagggtgtgttactgatctgtaa

SEQ ID NO: 49 - protein, 570 aa, Lactococcus lactis
MEFKYNGKVESVELNKYSKTLTQDPTQPATQAMYYGIGFKDEDFKKAQVGIVSMDWDGNPCNMHLGTLGSKIKSSVNQTDGLIGLQFHTIGVSDGIANGKLGMRYSLVSREVIADSIETNAGAEYYDAIVAIPGCDKNMPGSIIGMARLNRPSIMVYGGTIEHGEYKGEKLNIVSAFESLGQKITGNISDEDYHGVICNAIPGQGACGGMYTANTLAAAIETLGMSLPYSSSNPAVSQEKQEECDEIGLAIKNLLEKDIKPSDIMTKEAFENAITIVMVLGGSTNAVLHIIAMANAIGVEITQDDFQRISDITPVLGDFKPSGKYMMEDLHKIGGLPAVLKYLLKEGKLHGDCLTVTGKTLAENVETALDLDFDSQDIMRPLKNPIKATGHLQILYGNLAQGGSVAKISGKEGEFFKGTARVFDGEQHFIDGIESGRLHAGDVAVIRNIGPVGGPGMPEMLKPTSALIGAGLGKSCALITDGRFSGGTHGFVVGHIVPEAVEGGLIGLVEDDDIIEIDAVNNSISLKVSDEEIAKRRANYQKPTPKATRGVLAKFAKLTRPASEGCVTDL

SEQ ID NO: 50 - DNA, 1701 bp, Artificial Sequence
  Nucleotide sequence for Saccharomyces cerevisiae ILV3deltaN
atgaagaagctcaacaagtactcgtatatcatcactgaacctaagggccaaggtgcgtcccaggccatgctttatgccaccggtttcaagaaggaagatttcaagaagcctcaagtcggggttggttcctgttggtggtccggtaacccatgtaacatgcatctattggacttgaataacagatgttctcaatccattgaaaaagcgggtttgaaagctatgcagttcaacaccatcggtgtttcagacggtatctctatgggtactaaaggtatgagatactcgttacaaagtagagaaatcattgcagactcctttgaaaccatcatgatggcacaacactacgatgctaacatcgccatcccatcatgtgacaaaaacatgcccggtgtcatgatggccatgggtagacataacagaccttccatcatggtatatggtggtactatcttgcccggtcatccaacatgtggttcttcgaagatctctaaaaacatcgatatcgtctctgcgttccaatcctacggtgaatatatttccaagcaattcactgaagaagaaagagaagatgttgtggaacatgcatgcccaggtcctggttcttgtggtggtatgtatactgccaacacaatggcttctgccgctgaagtgctaggtttgaccattccaaactcctcttccttcccagccgtttccaaggagaagttagctgagtgtgacaacattggtgaatacatcaagaagacaatggaattgggtattttacctcgtgatatcctcacaaaagaggcttttgaaaacgccattacttatgtcgttgcaaccggtgggtccactaatgctgttttgcatttggtggctgttgctcactctgcgggtgtcaagttgtcaccagatgatttccaaagaatcagtgatactacaccattgatcggtgacttcaaaccttctggtaaatacgtcatggccgatttgattaacgttggtggtacccaatctgtgattaagtatctatatgaaaacaacatgttgcacggtaacacaatgactgttaccggtgacactttggcagaacgtgcaaagaaagcaccaagcctacctgaaggacaagagattattaagccactctcccacccaatcaaggccaacggtcacttgcaaattctgtacggttcattggcaccaggtggagctgtgggtaaaattaccggtaaggaaggtacttacttcaagggtagagcacgtgtgttcgaagaggaaggtgcctttattgaagccttggaaagaggtgaaatcaagaagggtgaaaaaaccgttgttgttatcagatatgaaggtccaagaggtgcaccaggtatgcctgaaatgctaaagccttcctctgctctgatgggttacggtttgggtaaagatgttgcattgttgactgatggtagattctctggtggttctcacgggttcttaatcggccacattgttcccgaagccgctgaaggtggtcctatcgggttggtcagagacggcgatgagattatcattgatgctgataataacaagattgacctattagtctctgataaggaaatggctcaacgtaaacaaagttgggttgcacctccacctcgttacacaagaggtactctatccaagtatgctaagttggtttccaacgcttccaacggttgtgttttagatgcttga

SEQ ID NO: 51 - protein, 566 aa, Artificial Sequence
  Amino acid sequence for Saccharomyces cerevisiae ILV3deltaN
MKKLNKYSYIITEPKGQGASQAMLYATGFKKEDFKKPQVGVGSCWWSGNPCNMHLLDLNNRCSQSIEKAGLKAMQFNTIGVSDGISMGTKGMRYSLQSREIIADSFETIMMAQHYDANIAIPSCDKNMPGVMMAMGRHNRPSIMVYGGTILPGHPTCGSSKISKNIDIVSAFQSYGEYISKQFTEEEREDVVEHACPGPGSCGGMYTANTMASAAEVLGLTIPNSSSFPAVSKEKLAECDNIGEYIKKTMELGILPRDILTKEAFENAITYVVATGGSTNAVLHLVAVAHSAGVKLSPDDFQRISDTTPLIGDFKPSGKYVMADLINVGGTQSVIKYLYENNMLHGNTMTVTGDTLAERAKKAPSLPEGQEIIKPLSHPIKANGHLQILYGSLAPGGAVGKITGKEGTYFKGRARVFEEEGAFIEALERGEIKKGEKTVVVIRYEGPRGAPGMPEMLKPSSALMGYGLGKDVALLTDGRFSGGSHGFLIGHIVPEAAEGGPIGLVRDGDEIIIDADNNKIDLLVSDKEMAQRKQSWVAPPPRYTRGTLSKYAKLVSNASNGCVLDA

SEQ ID NO: 52 - DNA, 1716 bp, Streptococcus mutans
atgactgacaaaaagacacttaaggatttgagaaatagatcctctgtctacgactctatggtgaaatctcctaatagagccatgttaagagcaactgggatgcaagacgaagatttcgaaaagcctatcgtgggtgtgatttctacatgggctgagaacacgccttgcaatatccatcttcacgatttcggtaaactggcaaaggttggagtgaaggaagccggtgcgtggccagtccagttcgggacaataactgtgtcagatggcatcgccatgggtactcaaggtatgaggttttccttgacatcaagagatatcatcgctgattctatagaggcagccatgggtggacataatgccgatgcttttgtagctataggtggttgtgacaaaaacatgccaggctcagtcattgctatggccaatatggatattccagcgattttcgcttatggtgggactattgctccagggaatttggacggtaaagatatcgaccttgtcagcgttttcgagggtgttggccattggaatcatggagacatgaccaaggaagaggttaaagcgctggaatgtaacgcttgtcctggtcctggtggatgcggtggaatgtataccgccaacacaatggcaactgctattgaagtactaggcctttctctacctggctcttcaagtcatccagcagaatctgctgagaaaaaggccgatattgaagaggctggacgtgcagtagtaaagatgttggaaatgggtttgaagccaagtgatatactgactcgtgaggcgttcgaagatgcaattacagtcactatggccttaggcggatcaaccaactctactttgcatcttttagctatcgctcatgcggccaacgtcgaactaacgcttgatgatttcaatacatttcaagagaaagttccacacttggcagacttaaagcctagcggtcaatatgtctttcaagatttgtacaaggtcggaggcgttccagctgttatgaaatacctcctcaaaaacggcttcctacatggtgatagaatcacatgtacaggcaaaacagtagccgaaaacttaaaggcattcgatgatctcactcctggtcaaaaagttatcatgccactggaaaatccaaagagagaagatggaccactgataatcttacacgggaacttggctcctgatggtgccgtagcaaaggtttccggtgttaaggttaggagacacgtcggtccagcaaaagttttcaactctgaggaggaagcaatcgaagctgtgctcaacgatgatatagttgatggcgacgttgtagtggttcgattcgttggaccaaaaggtgggcctggtatgcctgaaatgctatctctgtccagtatgattgtaggaaagggtcagggcgaaaaagtagcattgttaactgatggaagattctctggcggaacatacgggttagtcgtcggccacatcgccccagaagcccaagacggaggcccaatcgcatacttgcaaaccggcgatattgtgacgatagatcaagatacaaaggaactacactttgacattagcgatgaggagcttaagcatagacaggaaaccatcgaattgccaccattgtactcaagaggaatactagggaagtacgcgcatatcgttagttcagcctccagaggggctgttactgacttttggaagccagaggagacaggcaaaaagtaa

SEQ ID NO: 53 - protein, 571 aa, Streptococcus mutans
MTDKKTLKDLRNRSSVYDSMVKSPNRAMLRATGMQDEDFEKPIVGVISTWAENTPCNIHLHDFGKLAKVGVKEAGAWPVQFGTITVSDGIAMGTQGMRFSLTSRDIIADSIEAAMGGHNADAFVAIGGCDKNMPGSVIAMANMDIPAIFAYGGTIAPGNLDGKDIDLVSVFEGVGHWNHGDMTKEEVKALECNACPGPGGCGGMYTANTMATAIEVLGLSLPGSSSHPAESAEKKADIEEAGRAVVKMLEMGLKPSDILTREAFEDAITVTMALGGSTNSTLHLLAIAHAANVELTLDDFNTFQEKVPHLADLKPSGQYVFQDLYKVGGVPAVMKYLLKNGFLHGDRITCTGKTVAENLKAFDDLTPGQKVIMPLENPKREDGPLIILHGNLAPDGAVAKVSGVKVRRHVGPAKVFNSEEEAIEAVLNDDIVDGDVVVVRFVGPKGGPGMPEMLSLSSMIVGKGQGEKVALLTDGRFSGGTYGLVVGHIAPEAQDGGPIAYLQTGDIVTIDQDTKELHFDISDEELKHRQETIELPPLYSRGILGKYAHIVSSASRGAVTDFWKPEETGKK

SEQ ID NO: 54 - DNA, 1923 bp, Neurospora crassa
atggcttctaatcaagataacaaggcagttgctccagacgctgctgcaccagcgggtcagtcaacaaccaccacaactacaaatgataacagtgaaaggaatctaccaaaggaaggcgaatacattcaatggaggacacttccagcgggcaatccagatcagttgaacagatggagtcatttcctgactcgtgagcatgagtttccaggcgctcaggcaatgttgtacggtgcgggtgtacctaacaaagatatgatgaaaaaggctcctcatgttgggatcgctactgtttggtgggaaggtaacccatgtaatactcatctgcttgatctaggtcaaaaagtcaaaaaggctgttgaaagagagaagatgttagcttggcaattcaacacaattggcgttagtgacggaataacaatgggtggtgaaggcatgaggtactctttgcagagcagagagatcatagcagattctatagagactgtgacatgtgcacaacaccatgatgccaatatctcaattccagggtgcgacaaaaacatgccaggcgtcatcatggcagctgcaagacacaacagaccattcgttatgatctacggaggtacaatgagaggcggtcattccgaattacttgatagacctatcaatatcgtaacttgttacgaggcctcaggggcctatacttatggtagacttaagccagcctgtccaaactccactgctaccccatctgacgtgatggacgatatagaacaacacgcctgtccaggggctggagcttgtggagggatgtacaccgcgaatactatggcaaccgccatagaagctatgggtctgacagcaccagggtcatcctcctttccagccagctcaccagaaaagttcagagagtgcgaaaaagccgcggaatacattaagatatgcatggaaaaagatattcgtccaagagacttactaacaaaggcttccttcgagaatgctctcgtcttgacaatgattctaggtggttcaaccaacggtgttttacattacttagccatggccaactccgccgatgtcgatctaactcttgatgatatcaatagagtcagtgctaagactcctttcctcgctgatatggctccatctggtagatactatatggaggatttgtacaaggtaggtggtactccagccgtactcaagatgttgatagctgccggctatatcgatggaacaattccaacaataacaggaaaatctttggctgaaaacgtgtcagattggccatctttagaccctgatcaaaagattatccgtcctttggataatcctatcaaatcacaaggtcacattagagtgctgtatggtaacttctctcctggtggggctgttgccaagatcacgggtaaggaaggtcttagttttactggtaaggcaagatgctttaacaaagagtttgaattggatgctgcgctgaaaaactctgaaatcacgctcgaacaaggaaatcaagttctaattgtaaggtatgaaggccctaagggcggaccaggcatgccagaacaattgaaagcatctgccgctatcatgggcgctggtttgacgaacgtagctttagtcacggatgggcgatactctggcgcttctcacggtttcatcgtcggtcacgtcgtgcctgaggcggcaactggcggacctattgctttagtaaaggatggagatttgatcacaattgatgcagtcagaaatagaattgatgttgtcaaaaccgtagaaggagtggagggcgaggaggaaattgcaaaggttttagaagagaggaaaaagggatggaaagcacctaagatgaagccaacaagaggagccctggccaaatacgcaagacttgttggtgacgcatcacatggagcagttacagacttaggaggagatgcttactaa

SEQ ID NO: 55 - protein, 640 aa, Neurospora crassa
MASNQDNKAVAPDAAAPAGQSTTTTTTNDNSERNLPKEGEYIQWRTLPAGNPDQLNRWSHFLTREHEFPGAQAMLYGAGVPNKDMMKKAPHVGIATVWWEGNPCNTHLLDLGQKVKKAVEREKMLAWQFNTIGVSDGITMGGEGMRYSLQSREIIADSIETVTCAQHHDANISIPGCDKNMPGVIMAAARHNRPFVMIYGGTMRGGHSELLDRPINIVTCYEASGAYTYGRLKPACPNSTATPSDVMDDIEQHACPGAGACGGMYTANTMATAIEAMGLTAPGSSSFPASSPEKFRECEKAAEYIKICMEKDIRPRDLLTKASFENALVLTMILGGSTNGVLHYLAMANSADVDLTLDDINRVSAKTPFLADMAPSGRYYMEDLYKVGGTPAVLKMLIAAGYIDGTIPTITGKSLAENVSDWPSLDPDQKIIRPLDNPIKSQGHIRVLYGNFSPGGAVAKITGKEGLSFTGKARCFNKEFELDAALKNSEITLEQGNQVLIVRYEGPKGGPGMPEQLKASAAIMGAGLTNVALVTDGRYSGASHGFIVGHVVPEAATGGPIALVKDGDLITIDAVRNRIDVVKTVEGVEGEEEIAKVLEERKKGWKAPKMKPTRGALAKYARLVGDASHGAVTDLGGDAY

SEQ ID NO: 56 - DNA, 771 bp, Drosophila melanogaster
atgtcgtttactttgaccaacaagaacgtgattttcgttgccggtctgggaggcattggtctggacaccagcaaggagctgctcaagcgcgatctgaagaacctggtgatcctcgaccgcattgagaacccggctgccattgccgagctgaaggcaatcaatccaaaggtgaccgtcaccttctacccctatgatgtgaccgtgcccattgccgagaccaccaagctgctgaagaccatcttcgcccagctgaagaccgtcgatgtcctgatcaacggagctggtatcctggacgatcaccagatcgagcgcaccattgccgtcaactacactggcctggtcaacaccacgacggccattctggacttctgggacaagcgcaagggcggtcccggtggtatcatctgcaacattggatccgtcactggattcaatgccatctaccaggtgcccgtctactccggcaccaaggccgccgtggtcaacttcaccagctccctggcgaaactggcccccattaccggcgtgacggcttacactgtgaaccccggcatcacccgcaccaccctggtgcacacgttcaactcctggttggatgttgagcctcaggttgccgagaagctcctggctcatcccacccagccctcgttggcctgcgccgagaacttcgtcaaggctatcgagctgaaccagaacggagccatctggaaactggacttgggcaccctggaggccatccagtggaccaagcactgggactccggcatctaa

SEQ ID NO: 57 - protein, 256 aa, Drosophila melanogaster
MSFTLTNKNVIFVAGLGGIGLDTSKELLKRDLKNLVILDRIENPAAIAELKAINPKVTVTFYPYDVTVPIAETTKLLKTIFAQLKTVDVLINGAGILDDHQIERTIAVNYTGLVNTTTAILDFWDKRKGGPGGIICNIGSVTGFNAIYQVPVYSGTKAAVVNFTSSLAKLAPITGVTAYTVNPGITRTTLVHTFNSWLDVEPQVAEKLLAHPTQPSLACAENFVKAIELNQNGAIWKLDLGTLEAIQWTKHWDSGI

SEQ ID NO: 58 - DNA, 1023 bp, Lactococcus lactis
atgaaagcagcagtagtaagacacaatccagatggttatgcggaccttgttgaaaaggaacttcgagcaatcaaacctaatgaagctttgcttgacatggagtattgtggagtctgtcataccgatttgcacgttgcagcaggtgattatggcaacaaagcagggactgttcttggtcatgaaggaattggaattgtcaaagaaattggagctgatgtaagctcgcttcaagttggtgatcgggtttcagtggcttggttctttgaaggatgtggtcactgtgaatactgtgtatctggtaatgaaactttttgtcgagaagttaaaaatgcaggatattcagttgatggcggaatggctgaagaagcaattgttgttgccgattatgctgtcaaagttcctgacggacttgacccaattgaagctagctcaattacttgtgctggagtaacaacttacaaagcaatcaaagtatcaggagtaaaacctggtgattggcaagtaatttttggtgctggaggacttggaaatttagcaattcaatatgctaaaaatgtttttggagcaaaagtaattgctgttgatattaatcaagataaattaaatttagctaaaaaaattggagctgatgtgattatcaattctggtgatgtaaatccagttgatgaaattaaaaaaataactggcggcttaggggtgcaaagtgcaatagtttgtgctgttgcaaggattgcttttgaacaagcggttgcttctttgaaacctatgggcaaaatggttgctgtggcacttcccaatactgagatgactttatcagttccaacagttgtttttgacggagtggaggttgcaggttcacttgtcggaacaagacttgacttggcagaagcttttcaatttggagcagaaggtaaggtaaaaccaattgttgcgacacgcaaactggaagaaatcaatgatattattgatgaaatgaaggcaggaaaaattgaaggccgaatggtcattgattttactaaataa

SEQ ID NO: 59 - protein, 340 aa, Lactococcus lactis
MKAAVVRHNPDGYADLVEKELRAIKPNEALLDMEYCGVCHTDLHVAAGDYGNKAGTVLGHEGIGIVKEIGADVSSLQVGDRVSVAWFFEGCGHCEYCVSGNETFCREVKNAGYSVDGGMAEEAIVVADYAVKVPDGLDPIEASSITCAGVTTYKAIKVSGVKPGDWQVIFGAGGLGNLAIQYAKNVFGAKVIAVDINQDKLNLAKKIGADVIINSGDVNPVDEIKKITGGLGVQSAIVCAVARIAFEQAVASLKPMGKMVAVALPNTEMTLSVPTVVFDGVEVAGSLVGTRLDLAEAFQFGAEGKVKPIVATRKLEEINDIIDEMKAGKIEGRMVIDFTK

SEQ ID NO: 60 - DNA, 1023 bp, Lactococcus lactis
atgaaagcagcagtagtaagacacaatccagatggttatgcggaccttgttgaaaaggaacttcgagcaatcaaacctaatgaagctttgcttgacatggagtattgtggagtctgtcataccgatttgcacgttgcagcaggtgattttggcaacaaagcagggactgttcttggtcatgaaggaattggaattgtcaaagaaattggagctgatgtaagctcgcttcaagttggtgatcgggtttcagtggcttggttctttgaaggatgtggtcactgtgaatactgtgtatctggtaatgaaactttttgtcgagaagttaaaaatgcaggatattcagttgatggcggaatggctgaagaagcaattgttgttgccgattatgctgtcaaagttcctgacggacttgacccaattgaagctagctcaattacttgtgctggagtaacaacttacaaagcaatcaaagtatcaggagtaaaacctggtgattggcaagtaatttttggtgctggaggacttggaaatttagcaattcaatatgctaaaaatgtttttggagcaaaagtaattgctgttgatattaatcaagataaattaaatttagctaaaaaaattggagctgatgtgactatcaattctggtgatgtaaatccagttgatgaaattaaaaaaataactggcggcttaggggtgcaaagtgcaatagtttgtgctgttgcaaggattgcttttgaacaagcggttgcttctttgaaacctatgggcaaaatggttgctgtggcagttcccaatactgagatgactttatcagttccaacagttgtttttgacggagtggaggttgcaggttcacttgtcggaacaagacttgacttggcagaagcttttcaatttggagcagaaggtaaggtaaaaccaattgttgcgacacgcaaactggaagaaatcaatgatattattgatgaaatgaaggcaggaaaaattgaaggccgaatggtcattgattttactaaataa

SEQ ID NO: 61 - protein, 340 aa, Lactococcus lactis
MKAAVVRHNPDGYADLVEKELRAIKPNEALLDMEYCGVCHTDLHVAAGDFGNKAGTVLGHEGIGIVKEIGADVSSLQVGDRVSVAWFFEGCGHCEYCVSGNETFCREVKNAGYSVDGGMAEEAIVVADYAVKVPDGLDPIEASSITCAGVTTYKAIKVSGVKPGDWQVIFGAGGLGNLAIQYAKNVFGAKVIAVDINQDKLNLAKKIGADVTINSGDVNPVDEIKKITGGLGVQSAIVCAVARIAFEQAVASLKPMGKMVAVAVPNTEMTLSVPTVVFDGVEVAGSLVGTRLDLAEAFQFGAEGKVKPIVATRKLEEINDIIDEMKAGKIEGRMVIDFTK

SEQ ID NO: 62 - DNA, 4745 bp, Artificial Sequence
  Saccharomyces cerevisiae AFT1-1UP Integration Construct
cacattggccgttttaacgcaagttggcgtacttatattgactgttggatgaaagggtaatcaagagaaacggaaacggcctcctcatcgttaagctcatcagtattcatttctcccctttctgctccatcgcgtgctcgagactatattcttcagattatcaagcagaaacagaattcgcatattacataactttcacaggttgaagtataaaccgctacagtacacaacctcggatagaatatagggaagaggccaattccgtgaaaacgatttaatattctttacagttacaaaaagtattacctattatcctcttttcggtgtcattgacaaacctcttagcgacagaaactccctagcaaaagagtaaatccataggaacaacaaaagaagacaaattatcataatataattgggagtgatagacgacgattcatgctataccgtaggtttttgatacaagtctaacagttatactatttttaaaaacaaaaaaataacagaaaaatctacgacaatggaaggcttcaatccggctgacatagaacatgcgtcaccgattaattcatctgacagccattcatcctcctttgtatatgctctacccaaaagtgctagtgaatatgtagtcaaccataatgagggtcgtgcaagtgcaagtggaaatccagccgcagtgccgtctcccataatgacactgaatctcaaaagcacacattccctcaatattgatcagcatgttcatacctcaacatcgccgacggaaactattgggcatattcatcatgtggaaaagctgaatcaaaacaatttgattcatctggatccagtacccaactttgaagataagtccgatattaagccttggttgcaaaagattttttatcctcaaggaatagaacttgtgatagaaaggtcggacgcatttaaagttgtcttcaagtgtaaagctgctaaaaggggaaggaacgcgagaaggaaaagaaaagataagcccaaaggacaggaccacgaagacgagaaatccaagatcaatgatgacgaattagaatatgcgagtccttctaatgccacagtaaccaatgggcctcaaacatcgcccgatcaaacatcctccataaagccaaagaaaaaaagatgtgtatcgaggtttaataactgtccgtttagagtacgagctacttattcgttaaagaggaaaagatggagcattgttgtaatggacaataaccattcacatcagctaaagtttaaccctgattccgaagagtacaaaaaattcaaagaaaaattaagaaaggataatgacgtagatgcaatcaagaaattcgacgaattggaatacagaactttggccaatttgcccattccaacagctacaatcccctttgattgtggtttaacaaatgaaatacaaagtttcaatgtcgtattgcccactaacagtaatgttacttcatcagcatcctcttcaactgtatcgtccatatcccttgattcatcgaatgcatctaaaaggccatgcttaccctctgtaaataacaccggtagtatcaataccaataacgtaaggaaaccgaaaagccagtgtaagaataaagacacactcttaaaaagaaccaccatgcagaactttctcacaactaaatcaaggctgcgtaagaccggtacgccaacatcttcgcaacactcatctacagcattttcaggatatattgatgatcctttcaatttgaatgaaatcttgccactgccggcatccgatttcaagctaaacactgtaacaaatttgaacgaaattgactttacgaacatttttaccaaatcgccgcatccacatagcgggtctacccatccaagacaagtcttcgaccaattggacgattgttcctctatactcttctctccattaactacaaacacgaataatgaatttgaaggagagtcagatgattttgttcattctccatatttgaactcagaggcagatttcagccaaattcttagtagtgctcccccagtccatcatgacccaaatgaaacacatcaggaaaaccaggatattattgatagatttgctaatagttcccaagaacataatgagtatattctacaatatttgacgcactccgatgctgctaaccacaataacatcggcgttccaaacaacaattcacattcgctaaatactcagcataacgtttctgatctgggcaactcacttttaagacaagaagctttagttggcagctcttcaacaaaaatcttcgacgaattgaaatttgtacaaaatggcccacacggttctcaacatcctatagattttcaacatgttgaccatcgtcatctcagctctaatgaacctcaagtacgatcacatcaatatggtccgcaacagcagccaccgcagcaattgcaatatcaccaaaatcagccccacgacggccataaccacgaacagcaccaaacagtacaaaaggatatgcaaacgcatgaatcgctagaaataatgggaaacacattattggaagagttcaaagacattaaaatggtgaacggcgagttgaagtatgtgaagccagaagattaggccgctgcgggtatagaaagggttctttactctatagtacctcctcgctcagcatctgcttcttcccaaagatgaacgcggcgttatgtcactaacgacgtgcaccaacttgcggaaagtggaatcccgttccaaaactggcatccactaattgatacatctacacaccgcacgccttttttctgaagcccactttcgtggactttgccatatgcaaaattcatgaagtgtgataccaagtcagcatacacctcactagggtagtttctttggttgtattgatcatttggttcatcgtggttcattaattttttttctccattgctttctggctttgatcttactatcatttggatttttgtcgaaggttgtagaattgtatgtgacaagtggcaccaagcatatataaaaaaaaaaagcattatcttcctaccagagttgattgttaaaaacgtatttatagcaaacgcaattgtaattaattcttattttgtatcttttcttcccttgtctcaatcttttatttttattttatttttcttttcttagtttctttcataacaccaagcaactaatactataacatacaataatagatgggtaaaaagcctgaactcaccgcgacgtctgtcgagaagtttctgatcgaaaagttcgacagcgtctccgacctgatgcagctctcggagggcgaagaatctcgtgctttcagcttcgatgtaggagggcgtggatatgtcctgcgggtaaatagctgcgccgatggtttctacaaagatcgttatgtttatcggcactttgcatcggccgcgctcccgattccggaagtgcttgacattggggagttcagcgagagcctgacctattgcatctcccgccgtgcacagggtgtcacgttgcaagacctgcctgaaaccgaactgcccgctgttctccagccggtcgcggaggccatggatgcgatcgctgcggccgatcttagccagacgagcgggttcggcccattcggaccgcaaggaatcggtcaatacactacatggcgtgatttcatatgcgcgattgctgatccccatgtgtatcactggcaaactgtgatggacgacaccgtcagtgcgtccgtcgcgcaggctctcgatgagctgatgctttgggccgaggactgccccgaagtccggcacctcgtgcatgcggatttcggctccaacaatgtcctgacggacaatggccgcataacagcggtcattgactggagcgaggcgatgttcggggattcccaatacgaggtcgccaacatcctcttctggaggccgtggttggcttgtatggagcagcagacgcgctacttcgagcggaggcatccggagcttgcaggatcgccgcgcctccgggcgtatatgctccgcattggtcttgaccaactctatcagagcttggttgacggcaatttcgatgatgcagcttgggcgcagggtcgatgcgacgcaatcgtccgatccggagccgggactgtcgggcgtacacaaatcgcccgcagaagcgcggccgtctggaccgatggctgtgtagaagtactcgccgatagtggaaaccgacgccccagcactcgtccgagggcaaaggaataacatatagatgaaatcaaacttagacgtatctctcgtccattttcattacattttcatctttcttcattaattatatactgaacatatacgcatctatacaattttgactttttaaagaagaaaaagaaaacaatagtatacattcttttttctacttttgttacagataaaaaatcgttcttattatattacatatatcggtgctaagatcaggattttttcatgttccttccccctgttatttcacatcatccttttgccggtagattaggctggtgtaaatagtagtgcttttctcatacatacaagacatacgtgaagataagtcccattttctctccctctgtcattaattttgaaagttcgttgagcactcatgaaaactgcgtccttttgtttttttgatctgaagtaaatatgtgtgagcaagataagcacacaaagaataaaaccatcgaagtatcctttcttctttgttgtgattgaaaaaacacattttcccgagagtgacatttgggacattctct

SEQ ID NO: 63 - DNA, 3794 bp, Artificial Sequence
  Saccharomyces cerevisiae AFT2-1UP Integration Construct
cttaaataaaggttaaggaaatgtaaataaaaaaaataacagtgacattaatttgtatatatctcaacttcttcactttaacctgtctgagctgtttggttttgaactggaagcacgtttctcattttattgaacgataccagagccattcattattcgattgacggtaagcggtattgtgcgaaaagcaaagggaaaaaatagaaagaacaaaaaaaagaaagaaaaaagcaccgtaaaaaaaaaaatcgtttcgtgggccgagatcggtaaagtggctttcttttagtcagaattgattttcttttgattaaggcaaaaactgtgcaaattaaactgatggacctatacataatagtgaacacgactcattcaaaaaatttgttgtagtgaccagaaactctggcgcaaattaatcaagagaaagcgacccccaagaaatgaaagcaaagtcgatgaagagcataatatctgtgccaatatcagtgtctaaaacagggaaaatgaagttaacagcatctcccgataatctagcatctatgatgtctaaagaccaaaataaacttattcatttagacccagttccgtcttttgaggacaggcacgagattaaaccgtggctacagaaaatattctatcctcaaggaatagatatagtcatcgaaagatcagatagtagcaaagttacttttaagtgtaggtcagtacgatcgaaagtagggttgaaccctaaatccaaaggttcctcttcaagatcccatgcatgtccatttagaattagagcagcctactctgtgcggttacagaagtggaacgtggttgttatgaataacatacattcacatgagctgagatttgatttgattactaaaacggatgactataaaaagtttaaggaaaatcttcgtcagaagaacgacgaaaaagccatcaaaacatttgatgaattagaatataaagcaagtctaaacttaccactcgtcacaccaattatttcttttgactgtgggttaaccaaggaaattgaagctttcaataacatttttctcccactatcaaacccccctttgacgtctaaaaaaaatttgctcaaaacaaataaaaactccgtttctaaaataaaatccagacagatggataattcgaaacctaggccaaggttgaaaacgaagttggatgcggatctacatgataccggatttttagacaatttcaaaacgcggaattcctgtgtaaagatagagaaagaagattctttaacgaacttaaacgaaattgattttacgaacatgttttgcaacgacaatttcatccaaaattacaaccaaggcctgatggaacttttgacagaacctacaccaggtccttcgtcctcttcttgtatacttccttcaacaccaacgaggcccttgtcacaaagcaaaatggatatagccctgtcagaatcaacaacatcttcaccaaattttatggaaacagacgctccttatggagatgagatcattaaagtttccaaagataccaaaagcaacgcaccaactgctgatacagatattgctacgaacttaggcaaagagagaaacgaaaattttggcatgttaaactacaactacgaagcgttgcttcatttcaacgatgagcattttaatgaattaaattctattgacccagccttaatatcaaaatattaagccgctgcgggtatagaaagggttctttactctatagtacctcctcgctcagcatctgcttcttcccaaagatgaacgcggcgttatgtcactaacgacgtgcaccaacttgcggaaagtggaatcccgttccaaaactggcatccactaattgatacatctacacaccgcacgccttttttctgaagcccactttcgtggactttgccatatgcaaaattcatgaagtgtgataccaagtcagcatacacctcactagggtagtttctttggttgtattgatcatttggttcatcgtggttcattaattttttttctccattgctttctggctttgatcttactatcatttggatttttgtcgaaggttgtagaattgtatgtgacaagtggcaccaagcatatataaaaaaaaaaagcattatcttcctaccagagttgattgttaaaaacgtatttatagcaaacgcaattgtaattaattcttattttgtatcttttcttcccttgtctcaatcttttatttttattttatttttcttttcttagtttctttcataacaccaagcaactaatactataacatacaataatagatgggtaaaaagcctgaactcaccgcgacgtctgtcgagaagtttctgatcgaaaagttcgacagcgtctccgacctgatgcagctctcggagggcgaagaatctcgtgctttcagcttcgatgtaggagggcgtggatatgtcctgcgggtaaatagctgcgccgatggtttctacaaagatcgttatgtttatcggcactttgcatcggccgcgctcccgattccggaagtgcttgacattggggagttcagcgagagcctgacctattgcatctcccgccgtgcacagggtgtcacgttgcaagacctgcctgaaaccgaactgcccgctgttctccagccggtcgcggaggccatggatgcgatcgctgcggccgatcttagccagacgagcgggttcggcccattcggaccgcaaggaatcggtcaatacactacatggcgtgatttcatatgcgcgattgctgatccccatgtgtatcactggcaaactgtgatggacgacaccgtcagtgcgtccgtcgcgcaggctctcgatgagctgatgctttgggccgaggactgccccgaagtccggcacctcgtgcatgcggatttcggctccaacaatgtcctgacggacaatggccgcataacagcggtcattgactggagcgaggcgatgttcggggattcccaatacgaggtcgccaacatcctcttctggaggccgtggttggcttgtatggagcagcagacgcgctacttcgagcggaggcatccggagcttgcaggatcgccgcgcctccgggcgtatatgctccgcattggtcttgaccaactctatcagagcttggttgacggcaatttcgatgatgcagcttgggcgcagggtcgatgcgacgcaatcgtccgatccggagccgggactgtcgggcgtacacaaatcgcccgcagaagcgcggccgtctggaccgatggctgtgtagaagtactcgccgatagtggaaaccgacgccccagcactcgtccgagggcaaaggaataatatttagttttcaactcattaaaacggtatcacgtttaaatatgtgacaagatctgatggacatgaataatggtgatatcagcaccatcgagggattttggaccttagactttttaaagctacggaggacttaaagcatgtcgatacaaataagatatatcatggcttcatgcgctcaaaagttttattcttcaagtttgttgattataatatggttcacgtgcgcttcatcttttcataggtaatgcaccgcaacattcaattatctaaaaaactttcaggcgtgccggtcccctaatttttgcactgagatcatgagatcagtaagtaaaagctcatataggaaataatcatatagaaaaaagcagaggaatgatattcgaacattttctatacatcacccctcctatttttagatgaatctctaagatctaaatgccctcaacttaaatatgatattgaattaaaatgaattgta

SEQ ID NO: 64 - DNA, 26 bp, Artificial Sequence
  AFT1UP Forward Primer
ctcacttttaagacaagaagctttag

SEQ ID NO: 65 - DNA, 21 bp, Artificial Sequence
  pENO2 Reverse Primer
ttcatgaattttgcatatggc

SEQ ID NO: 66 - DNA, 22 bp, Artificial Sequence
  AFT1term Reverse Primer
ctgatcttagcaccgatatatg

SEQ ID NO: 67 - DNA, 20 bp, Artificial Sequence
  AFT1UpfullF Primer
tgacaaacctcttagcgaca

SEQ ID NO: 68 - DNA, 20 bp, Artificial Sequence
  AFT1UPsequence1 Primer
ggagtgatagacgacgattc

SEQ ID NO: 69 - DNA, 26 bp, Artificial Sequence
  AFT1UPsequence2 Primer
cactaacagtaatgttacttcatcag

SEQ ID NO: 70 - DNA, 20 bp, Artificial Sequence
  AFT2UP Forward Primer
cgaacttaggcaaagagaga

SEQ ID NO: 71 - DNA, 20 bp, Artificial Sequence
  AFT2term Reverse Primer
atgtccatcagatcttgtca

SEQ ID NO: 72 - DNA, 21 bp, Artificial Sequence
  AFT2UP full Forward
tgaacgataccagagccattc

SEQ ID NO: 73 - DNA, 23 bp, Artificial Sequence
  AFT2UP sequence 1
tttgttgtagtgaccagaaactc

SEQ ID NO: 74 - DNA, 19 bp, Artificial Sequence
  AFT2UP sequence 2
attcgaaacctaggccaag

SEQ ID NO: 75 - DNA, 22 bp, Artificial Sequence
  Primer 2649
tccaggcggtattgacagcagg

SEQ ID NO: 76 - DNA, 25 bp, Artificial Sequence
  Primer 2650
caatctgcaacatcaggtaccacgg

SEQ ID NO: 77 - DNA, 23 bp, Artificial Sequence
  Primer 2962
acgccaacatcttcgcaacactc

SEQ ID NO: 78 - DNA, 21 bp, Artificial Sequence
  Primer 2963
tgccggcagtggcaagatttc

SEQ ID NO: 79 - DNA, 25 bp, Artificial Sequence
  Primer 2966
cctcttcaagatcccatgcatgtcc

SEQ ID NO: 80 - DNA, 23 bp, Artificial Sequence
  Primer 2967
tgtaaccgcacagagtaggctgc

SEQ ID NO: 81 - DNA, 21 bp, Artificial Sequence
  Primer 2972
tggccactgaaggtaacgccg

SEQ ID NO: 82 - DNA, 23 bp, Artificial Sequence
  Primer 2973
ccggtaggaatgaaggcatgctg

SEQ ID NO: 83 - DNA, 21 bp, Artificial Sequence
  Primer 2976
tggcgctgagattgtggtcgg

SEQ ID NO: 84 - DNA, 20 bp, Artificial Sequence
  Primer 2977
tgaagcgtgcactagcgtcc

SEQ ID NO: 85 - DNA, 22 bp, Artificial Sequence
  Primer 2978
tgccgggcaaatcgtttctgag

SEQ ID NO: 86 - DNA, 25 bp, Artificial Sequence
  Primer 2979
cttgtggcccaaggtggtaaagacc

SEQ ID NO: 87 - DNA, 615 bp, Saccharomyces cerevisiae
atgaaattctcttccgctttggttctatctgctgttgccgctactgctcttgctgagagtatcaccaccaccatcactgccaccaagaacggtcatgtctacactaagactgtcacccaagatgctacttttgtttggggtggtgaagactcttacgccagcagcacttctgccgctgaatcttctgccgccgaaacttctgccgccgaaacctctgctgccgctaccacttctgctgccgctaccacttctgctgctgagacttcttctgctgctgagacttcttctgctgatgaaggttctggttctagtatcactaccactatcactgccaccaagaacggtcacgtctacactaagactgtcacccaagatgctacttttgtctggactggtgaaggcagcagcaacacctggtctccaagtagtacttctaccagctcagaagctgctacctcttctgcttcaaccactgcaaccaccactgctgaaacttcttcctctgctacatcctctagcaccgctgaattatctagttacaccggtgctgctgatgccatcaccgctggtactggtttgatgggtgctgcccttgctgccgtcatgttattgtaa

SEQ ID NO: 88 - protein, 204 aa, Saccharomyces cerevisiae
MKFSSALVLSAVAATALAESITTTITATKNGHVYTKTVTQDATFVWGGEDSYASSTSAAESSAAETSAAETSAAATTSAAATTSAAETSSAAETSSADEGSGSSITTTITATKNGHVYTKTVTQDATFVWTGEGSSNTWSPSSTSTSSEAATSSASTTATTTAETSSSATSSSTAELSSYTGAADAITAGTGLMGAALAAVMLL

SEQ ID NO: 89 - DNA, 1587 bp, Saccharomyces cerevisiae
atgaaattgtcttccgcttttgtattatctgctatcaccgttgccgctttaggcgaaagtattactactacgataactgctaccaaaaatgggcatgtttacaccaagactgtcactcaagatgctacttttgtctgggcaggagaaggcgctgcggtaacctccgcagtaactgaagcgtctactgtcgctgcaacgtctgctgccgctgaaacatctgttgccgctgaaacatctattgttgagccttccacttctgctcagggcacctctgctgatgaagggtctggttcgagtataaccaccactattacagccaccaaaaatggacatgtctacacaaagaccgtcacccaggatgctactttcgtatggactggagagggtgaacgtgctcctgcctcaactgttgctactgtcgaaacatctgttgccgctgaaacatctgttgctgaaccttctacctctgctcagggcacctctgctgatgaagggtctggttcgagtataaccaccactattacagccaccaaaaatggacatgtctacacaaagaccgtcacccaggacgctactttcgtatggactggtgagggtgaacgtgctcctgtctcaaccgttgctactgtcgaaacagctgcttctccagtaacatctgttgctgaaccttctgcctctactgatgaaggatctggttcgagtataactaccactattacagccaccaaaaatggacatgtctacacaaagaccgtcacccaggacgctactttcgtatggactggtgagggtgaacgcgctcctgcctccaccgttgcaacttctagtatttctgctattgaaattccctccactactgaggcctctattgtggaggcttcttctgctgttgagacttcctctgctgctgagacttcctctgctgttgagacttcctctgctgttgagacttcctctgctgttgagacttcttctgctgctgagacttcctctgctgctgagacttcctctgccgttgagacttcctctgctgttgagatttcttctgctgttgagacttctgctgttgagacttcttcttcttcctctactatcgagaccacttctgttaaaagcttatctcctactcagacttctctttcatcttctgtccaggcttcttctcctattgagacttcttctgctgcaaaaacctcttctgttgtgccaactttttcttctactactactgaaaattcctctaattctaaatccacgtctgcagttgtagcatctactaccacctcctctgagtcaagcgctactattgttactcctactagaattgggcaagcttacacagagagttcttctagggatgcccaatctgttcgtacccatgaaagtaacaattggtcatcaagttcttctgcaagcacaaaaatggtatcctctattacaagagttcaaaccactaccgctggtattttcactaacggtaagtcgtccacaactcctcaaatcgtgaattacacgggtgcggctgattctatcgccgctggtacgggtctgatgggcgctgcgctcgctgccgttatctttttgtaa

SEQ ID NO: 90 - protein, 528 aa, Saccharomyces cerevisiae
MKLSSAFVLSAITVAALGESITTTITATKNGHVYTKTVTQDATFVWAGEGAAVTSAVTEASTVAATSAAAETSVAAETSIVEPSTSAQGTSADEGSGSSITTTITATKNGHVYTKTVTQDATFVWTGEGERAPASTVATVETSVAAETSVAEPSTSAQGTSADEGSGSSITTTITATKNGHVYTKTVTQDATFVWTGEGERAPVSTVATVETAASPVTSVAEPSASTDEGSGSSITTTITATKNGHVYTKTVTQDATFVWTGEGERAPASTVATSSISAIEIPSTTEASIVEASSAVETSSAAETSSAVETSSAVETSSAVETSSAAETSSAAETSSAVETSSAVEISSAVETSAVETSSSSSTIETTSVKSLSPTQTSLSSSVQASSPIETSSAAKTSSVVPTFSSTTTENSSNSKSTSAVVASTTTSSESSATIVTPTRIGQAYTESSSRDAQSVRTHESNNWSSSSSASTKMVSSITRVQTTTAGIFTNGKSSTTPQIVNYTGAADSIAAGTGLMGAALAAVIFL

SEQ ID NO: 91 - DNA, 1911 bp, Saccharomyces cerevisiae
atgactaacgctttgctctctatagccgttttgcttttctcgatgctctcgctagcacaagcggagacgcacacgtttaattggaccactggctgggactacaggaacgttgatgggctaaagagccgtcccgtgatcacctgtaatggccagttcccatggccagatataacggtcaacaaaggtgaccgtgtgcagatttacttgaccaacggaatgaacaacaccaatacttctatgcatttccacggtctcttccaaaacggaaccgcctctatggacggtgtgcccttcttgacgcaatgtccaattgcgccaggcagtactatgctttacaatttcacggtggactacaatgtaggcacctactggtaccattcacacacggacggtcaatatgaagacgggatgaaaggtcttttcatcatcaaggatgatagcttcccctacgattacgatgaggaactttctttatcgcttagtgagtggtaccacgacttggtcacggacttgacgaagtcgttcatgagtgtttataatccgacaggtgctgagcccatcccacagaacttgattgttaacaacacgatgaatctgacatgggaagtccagcccgatacgacgtatcttttgagaattgtcaacgtgggtgggttcgtttcgcagtacttttggatcgaggaccacgaaatgaccgtggtcgaaatcgacggtatcactaccgagaagaacgtaacggatatgctttacatcactgtcgctcagagatatacagtcctggttcacactaaaaacgacacggacaaaaatttcgccatcatgcagaaatttgatgacaccatgttggatgtcattccaagtgatttacagctgaatgcaacctcttatatggtctacaacaaaaccgctgcgctgcccacacaaaattacgtggattcaattgataacttcttggacgatttctacttgcaaccgtacgagaaagaagccatctatggcgagccagatcatgtgattaccgttgacgttgttatggataacttgaaaaacggtgtgaattacgccttcttcaataatatcacctatactgcaccaaaagttcctactttgatgaccgttttgtcttcaggtgatcaagcaaacaactccgaaatctacggttcaaacacgcacactttcatcctagagaaggatgaaatcgtggagattgtgctaaataaccaggacacaggtacccatcctttccatttacatggtcacgctttccaaaccatccagagagatcgtacatatgatgatgccctaggtgaagttcctcacagtttcgatccggacaaccaccctgccttcccagaatacccaatgagaagagatactttatacgttagaccacaatccaatttcgtcatcaggtttaaagccgataacccaggtgtttggttcttccattgtcatatcgaatggcatttgttgcaaggtttgggtcttgttctcgtggaggatccttttggtatccaagatgctcattctcaacaactcagtgaaaaccacttagaagtttgccagagttgctctgtggccactgaaggtaacgccgctgccaatacactggatttaactgatttaactggtgaaaatgttcagcatgccttcattcctaccggttttaccaaaaaaggtattattgccatgacattctcctgctttgccggtattcttggtattatcacaattgcaatttatggtatgatggatatggaagatgcgaccgaaaaggttattcgagacttgcacgtggaccctgaagtcttgctaaatgaggttgatgaaaatgaagagcgtcaggtaaacgaagatcgtcattccactgaaaagcatcaatttttaactaaagccaaacggttcttctaa

SEQ ID NO: 92 - protein, 635 aa, Saccharomyces cerevisiae
MTNALLSIAVLLFSMLSLAQAETHTFNWTTGWDYRNVDGLKSRPVITCNGQFPWPDITVNKGDRVQIYLTNGMNNTNTSMHFHGLFQNGTASMDGVPFLTQCPIAPGSTMLYNFTVDYNVGTYWYHSHTDGQYEDGMKGLFIIKDDSFPYDYDEELSLSLSEWYHDLVTDLTKSFMSVYNPTGAEPIPQNLIVNNTMNLTWEVQPDTTYLLRIVNVGGFVSQYFWIEDHEMTVVEIDGITTEKNVTDMLYITVAQRYTVLVHTKNDTDKNFAIMQKFDDTMLDVIPSDLQLNATSYMVYNKTAALPTQNYVDSIDNFLDDFYLQPYEKEAIYGEPDHVITVDVVMDNLKNGVNYAFFNNITYTAPKVPTLMTVLSSGDQANNSEIYGSNTHTFILEKDEIVEIVLNNQDTGTHPFHLHGHAFQTIQRDRTYDDALGEVPHSFDPDNHPAFPEYPMRRDTLYVRPQSNFVIRFKADNPGVWFFHCHIEWHLLQGLGLVLVEDPFGIQDAHSQQLSENHLEVCQSCSVATEGNAAANTLDLDLTGENVQHAFIPTGFTKKGIIAMTFSCFAGILGIITIAIYGMMDMEDATEKVIRDLHVDPEVLLNEVDENEERQVNEDRHSTEKHQFLTKAKRFF

SEQ ID NO: 93 - DNA, 2061 bp, Saccharomyces cerevisiae
atggttagaacccgtgtattattctgcttatttatatctttttttgctacggttcaatcgagtgctacacttattagcacttcatgtatttcccaagctgcgctataccaatttggatgttctagtaaatctaaaagttgctactgtaaaaacatcaattggctgggttcagtgacagcatgtgcctatgagaattccaaatctaacaaaacactagacagcgccttaatgaagttagcatcccaatgttcaagcatcaaagtttatactttagaggacatgaagaatatttatttaaatgcgtcaaattatttgagagcacctgagaaaagtgataaaaaaaccgtggttagtcaaccgctcatggcgaacgagacagcgtatcattattattatgaggaaaattatggtatccatcttaacctaatgcgctctcaatggtgcgcttggggtctcgtcttcttctgggtggctgtgcttactgcagccactatcttgaacattctgaaaagggtgtttggtaagaacatcatggcaaactccgtcaaaaaatcacttatttatccttctgtttacaaagattataatgaacgaactttttatttatggaagcgtctaccatttaattttacaactcgaggcaagggtctcgtcgtattaatttttgttattttgactatattatctctcagttttggtcataatattaaacttccacacccatatgataggcccagatggagaagaagtatggcctttgtgagtcgtagagcagacttgatggccattgcacttttcccagtagtctatctattcggaataagaaataatcccttcatccctataacagggctttccttttctacatttaatttctatcataaatggtctgcctacgtttgtttcatgttggccgttgtacactcaattgtcatgaccgcctcgggagtgaaaagaggtgtgtttcaaagtctggttaggaaattttactttaggtggggtatagtggcaacgatattaatgtctattattattttccaaagtgaaaaagtatttagaaatagagggtatgagatattccttcttattcataaagcgatgaatattatgttcattattgccatgtactaccattgtcacaccctgggctggatgggttggatttggtcaatggctggtattttatgctttgatagattctgcaggattgttagaataatcatgaatggtggcttgaaaactgctactttgagtaccactgatgattctaatgttattaaaatttcagtaaaaaaaccaaagtttttcaagtaccaagtaggagctttcgcatacatgtatttcttatcaccaaaaagtgcatggttctatagtttccaatcacatccatttacagtattatcggaacgacaccgtgatccaaacaatccagatcaattgacgatgtacgtaaaggcaaataaaggtatcactcgagttttgttatcgaaagttctaagtgctccaaatcatactgttgattgtaaaatattccttgaaggcccatatggtgtaacggttccacatatcgctaagctaaaaagaaatctggtaggtgtagccgctggtttgggtgttgcggctatttatccgcactttgtcgaatgtttacggttaccatctactgatcaacttcagcataaattttactggattgttaatgacctatcccatttgaaatggtttgaaaatgaattgcaatggttaaaggagaaaagttgtgaagtctcagtcatatatactggttccagtgttgaggacacaaattcagatgagagtacaaaaggttttgatgataaagaagaaagcgaaatcactgttgaatgtctcaataaaagacctgatttgaaagaactagtgcgctcggaaataaaactctcagaactagagaataataatattaccttttattcctgcgggccagcaacgtttaacgacgattttagaaatgcagtggtccaaggtatagactcttccttgaagattgacgttgaactagaagaagaaagttttacatggtaa

SEQ ID NO: 94 - protein, 686 aa, Saccharomyces cerevisiae
MVRTRVLFCLFISFFATVQSSATLISTSCISQAALYQFGCSSKSKSCYCKNINWLGSVTACAYENSKSNKTLDSALMKLASQCSSIKVYTLEDMKNIYLNASNYLRAPEKSDKKTVVSQPLMANETAYHYYYEENYGIHLNLMRSQWCAWGLVFFWVAVLTAATILNILKRVFGKNIMANSVKKSLIYPSVYKDYNERTFYLWKRLPFNFTTRGKGLVVLIFVILTILSLSFGHNIKLPHPYDRPRWRRSMAFVSRRADLMAIALFPVVYLFGIRNNPFIPITGLSFSTFNFYHKWSAYVCFMLAVVHSIVMTASGVKRGVFQSLVRKFYFRWGIVATILMSIIIFQSEKVFRNRGYEIFLLIHKAMNIMFIIAMYYHCHTLGWMGWIWSMAGILCFDRFCRIVRIIMNGGLKTATLSTTDDSNVIKISVKKPKFFKYQVGAFAYMYFLSPKSAWFYSFQSHPFTVLSERHRDPNNPDQLTMYVKANKGITRVLLSKVLSAPNHTVDCKIFLEGPYGVTVPHIAKLKRNLVGVAAGLGVAAIYPHFVECLRLPSTDQLQHKFYWIVNDLSHLKWFENELQWLKEKSCEVSVIYTGSSVEDTNSDESTKGFDDKEESEITVECLNKRPDLKELVRSEIKLSELENNNITFYSCGPATFNDDFRNAVVQGIDSSLKIDVELEEESFTW

SEQ ID NO: 95 - DNA, 1215 bp, Saccharomyces cerevisiae
atgcctaacaaagtgtttaacgtggccgttttcttcgttgtgttcagagagtgcttggaagcagtgattgttatttccgtgctgctatcgtttttgaaacaggcaatcggggaacatgaccgggcgctgtaccgtaaattaaggattcaggtttgggtcggtgtgttactcgggttcatcatttgtctggccatcggtgcaggtttcatcggtgcgtactattcgctgcagaaggatattttcggaagcgcggaagacttgtgggaaggtatcttttgtatgattgcgacgataatgatctcgatgatgggtattcctatgttgagaatgaataagatgcagagtaagtggagagtgaagattgcgcggtcgttggtggagattcctcaccgtaagagagactatttcaagattgggttcttgagtagaagatatgctatgttccttttgccgtttattactgtcttgagagaaggtttggaagctgttgtgttcgttgccggtgcaggtattaccacacagggctcgcacgcctctgcttacccattgcccgttgtggttggtttgatatgtggtggtcttgttgggtatttgttgtactatggtgcttcgaaatcctcgctgcagattttcttgattttgtctacttcgatcttgtacctgatctccgccggtcttttctctcgtggtgcgtggtactttgaaaattacagattcaaccttgccagtggtggtgatgcttccgaaggcggtgatggtaatgggtcttataacatcagaaaggccgtttaccatgtcaattgttgcaacccagaactggacaatgggtgggatatcttcaatgctttgcttggatggcagaacaccggctacttgtcatccatgctttgttacaacatctattggttggttcttatcattgtgttgagtttaatgatattcgaagaaaggcgtggtcacttgcctttcaccaaaaacttacaattgaaacacttgaacccaggatactggatcaagaacaagaaaaagcaggagttgacggaagagcaaaagagacaactgtttgccaagatggagaacatcaacttcaatgaagatggtgagatcaatgtgcaagagaactacgaacttcccgagcaaactaccagtcattcctcgtctcaaaacgtcgccacagacaaggaagtcctccacgttaaagccgactctctttga

SEQ ID NO: 96 - protein, 404 aa, Saccharomyces cerevisiae
MPNKVFNVAVFFVVFRECLEAVIVISVLLSFLKQAIGEHDRALYRKLRIQVWVGVLLGFIICLAIGAGFIGAYYSLQKDIFGSAEDLWEGIFCMIATIMISMMGIPMLRMNKMQSKWRVKIARSLVEIPHRKRDYFKIGFLSRRYAMFLLPFITVLREGLEAVVFVAGAGITTQGSHASAYPLPVVVGLICGGLVGYLLYYGASKSSLQIFLILSTSILYLISAGLFSRGAWYFENYRFNLASGGDASEGGDGNGSYNIRKAVYHVNCCNPELDNGWDIFNALLGWQNTGYLSSMLCYNIYWLVLIIVLSLMIFEERRGHLPFTKNLQLKHLNPGYWIKNKKKQELTEEQKRQLFAKMENINFNEDGEINVQENYELPEQTTSHSSSQNVATDKEVLHVKADSL

SEQ ID NO: 97 - DNA, 462 bp, Saccharomyces cerevisiae
atgaaattctcaactattttcggagctactacagttatgactgccgtctcggcagcagctgtgtcgagtgtaatgaccactaagactattactgctactaacggtaataacgtttacactaaggtcgttaccgacaccgctgaccctatcattagttacagtaccactagaactgtcgttgtcagtaatagtgatgctacttacacaaaggttgtcaccgaaggaccagataccacctctgaaaagagtacaacaaagacacttactttgacaaacggttcaggttcatcaaccaacctttacaccaagaccgtcactcaagccgtcgaatcatctacatcctcctcatcctcctcatcctcctcctcctcttctgcctcttcttctggtgctgctcctgctgcattccaaggagcaagtgtcggtgcattggcccttggtttgatttcttacctattataa

SEQ ID NO: 98 - protein, 153 aa, Saccharomyces cerevisiae
MKFSTIFGATTVMTAVSAAAVSSVMTTKTITATNGNNVYTKVVTDTADPIISYSTTRTVVVSNSDATYTKVVTEGPDTTSEKSTTKTLTLTNGSGSSTNLYTKTVTQAVESSTSSSSSSSSSSSSASSSGAAPAAFQGASVGALALGLISYLL

SEQ ID NO: 99 - DNA, 1320 bp, Saccharomyces cerevisiae
atgaaactcggaagcaaacaggtaaaaattatatccttgttgctgctagacacagtgttcttcgggatcgagataactaccgggtacttgtctcactctttggctctaatcgcggactcattccatatgctaaacgatataatttctcttgtggttgcactttgggccgtaaatgttgccaaaaacagaaatccggattcaacgtacacttatggttggaaaagggcggagattttgggtgctctgattaacgccgtctttttgattgccttatgtgtctcaattttgatagaagcgctacaaagaattattgctccccccgtgattgaaaatcctaagtttgtgttgtatgtgggtgtcgcagggttgatatcgaacaccgttggacttttcttatttcacgacaatgatcaagagcatggacatggacacggacattcccatggcggtatctttgccgaccatgagatgcatatgccatcatcccacacacatacacatgcccatgttgatggaatagagaatactacaccaatggatagtacggataacattagtgagattatgcctaatgctatagtagatagttttatgaacgaaaatactagattattgacaccggaaaatgcatccaagacgccatcatactcaacgtcaagccatacgattgccagcggcggaaattacacagaacacaacaagcgcaagagatctttaaatatgcatggtgtgtttcttcacgttttgggcgatgctcttggcaacatcggcgttatgttgtctgcatttttcatttggaagaccgactattcttggaagtattatacagatccgcttgtctcattgataattaccggtataattttttcctctgcgcttcctctatcgtgcaaggcttccaaaatattgttacaagcgacaccttccactttatccggcgatcaagtagaaggtgatcttttgaaaataccaggaataatagctattcatgatttccatatttggaatttaacagagtctatttttattgcatctttgcatattcaactagatatcagcccggaacaatttactgacctggccaaaatagttagatcaaaacttcaccgctatggcattcactccgctactttgcaacctgaatttattaccagagaggttacttcaaccgaaagagccggagactcccaaggtgatcatctacaaaatgacccgctttcattaaggccaaagacatatggtactggcatttcaggttccacttgtcttatcgacgacgctgccaactgcaacacagctgattgcttagaggatcattaa

SEQ ID NO: 100 - protein, 439 aa, Saccharomyces cerevisiae
MKLGSKQVKIISLLLLDTVFFGIEITTGYLSHSLALIADSFHMLNDIISLVVALWAVNVAKNRNPDSTYTYGWKRAEILGALINAVFLIALCVSILIEALQRIIAPPVIENPKFVLYVGVAGLISNTVGLFLFHDNDQEHGHGHGHSHGGIFADHEMHMPSSHTHTHAHVDGIENTTPMDSTDNISEIMPNAIVDSFMNENTRLLTPENASKTPSYSTSSHTIASGGNYTEHNKRKRSLNMHGVFLHVLGDALGNIGVMLSAFFIWKTDYSWKYYTDPLVSLIITGIIFSSALPLSCKASKILLQATPSTLSGDQVEGDLLKIPGIIAIHDFHIWNLTESIFIASLHIQLDISPEQFTDLAKIVRSKLHRYGIHSATLQPEFITREVTSTERAGDSQGDHLQNDPLSLRPKTYGTGISGSTCLIDDAANCNTADCLEDH

SEQ ID NO: 101 - DNA, 1203 bp, Saccharomyces cerevisiae
atgccatttgtaaaaggttttgagccgatctccctaagagacacaaacctttttgaaccaattaagattggtaacactcagcttgcacatcgtgcggttatgcccccattgaccagaatgagggccactcaccccggaaatattccaaataaggagtgggctgctgtgtattatggtcagcgtgctcaaagacctggtaccatgatcatcacggaaggtacgtttatttcccctcaagccggcggctatgacaacgcccctgggatttggtctgatgagcaggtcgctgagtggaagaatatctttttagccatccatgattgtcagtcgttcgcgtgggtacaactttggtctttaggctgggcatccttcccagacgtattggcaagagacgggttacgctatgactgtgcatctgacagagtgtatatgaatgctacgttacaagaaaaggccaaagatgcgaataatctcgaacatagtttgactaaagacgacattaaacagtatatcaaggattacatccatgcggctaagaattctatcgcggctggcgccgatggtgtagaaattcatagcgccaatgggtacttgttgaatcagttcttggatccacattctaataagaggaccgacgaatacggcggaacgatcgaaaacagggcccgctttacactggaggttgtcgatgctcttatcgaaactatcggtcctgaacgggtgggtttgaggttgtcgccgtacggcacttttaacagtatgtctgggggtgctgaaccaggtattatcgctcaatattcgtatgttttgggtgaattagagaagagggcaaaggctggtaagcgtttggcctttgtgcacctcgttgaaccacgtgtcacggacccatcgttggtggagggcgaaggagaatattccgagggtactaacgattttgcctactctatatggaagggtccaatcatcagagctggtaattacgctcttcatccagaagtggttagagaacaagtaaaggatcccagaaccttgataggctatggtagattcttcatctctaacccagatttagtctaccgtttagaagagggcctgccattgaacaagtatgacagaagtaccttctacaccatgtccgcggaaggttataccgactacccaacatatgaagaggcagtagatttaggttggaacaagaactga

SEQ ID NO: 102 - protein, 400 aa, Saccharomyces cerevisiae
MPFVKGFEPISLRDTNLFEPIKIGNTQLAHRAVMPPLTRMRATHPGNIPNKEWAAVYYGQRAQRPGTMIITEGTFISPQAGGYDNAPGIWSDEQVAEWKNIFLAIHDCQSFAWVQLWSLGWASFPDVLARDGLRYDCASDRVYMNATLQEKAKDANNLEHSLTKDDIKQYIKDYIHAAKNSIAAGADGVEIHSANGYLLNQFLDPHSNKRTDEYGGTIENRARFTLEVVDALIETIGPERVGLRLSPYGTFNSMSGGAEPGIIAQYSYVLGELEKRAKAGKRLAFVHLVEPRVTDPSLVEGEGEYSEGTNDFAYSIWKGPIIRAGNYALHPEVVREQVKDPRTLIGYGRFFISNPDLVYRLEEGLPLNKYDRSTFYTMSAEGYTDYPTYEEAVDLGWNKN

SEQ ID NO: 103 - DNA, 858 bp, Saccharomyces cerevisiae
atgtgggctcaattatcatatactagaccagaatctcagaagactgacttaacgtcgttgttttccacagatcaagagcaaaatccattaaatgactaccagtaccagatcaatattagggaactggaggagtattacaacaagacgattttaaacgaggataacatacaggaaacaagcagtgaaatatcttcggcagtttcattctctccaccaaaaaatacaaacgctattcaaccggggctactgtatgatccacagttaatgaacccttttctcccatccgctcacctgaatagcacggcacctactacttttaaaaagaaactagaggtacaaataaatccggactatgtcccaaaatcttcacaattaccattaacttcacagaatttgcaacagttgtctcaacaaaagcccaaaaatgatgcttctttttcatcagagaaggaatcctcagctcaacctaaggtgaaaagccaagtgcaggaaactcccaaacaattatacaagacagagctgtgcgaatcattcactttaaaaggaagttgcccttatggcagtaagtgtcagtttgctcacggactcggcgaattaaaggttaagaaatcgtgcaagaatttcaggacgaagccctgtgtgaattgggagaaactaggttattgtccttatggcagaagatgctgcttcaaacatggcgacgacaacgacattgctgtttacgtgaaagctggtacttactgtaacgtctcttcgactagcaaacaatcagacgaaaagagaagcaatggtcgcggctccgccaagaagaagaatctaaatgttaaagtaaaggctttgcagagaatgacctggtga

SEQ ID NO: 104 - protein, 285 aa, Saccharomyces cerevisiae
MWAQLSYTRPESQKTDLTSLFSTDQEQNPLNDYQYQINIRELEEYYNKTILNEDNIQETSSEISSAVSFSPPKNTNAIQPGLLYDPQLMNPFLPSAHLNSTAPTTFKKKLEVQINPDYVPKSSQLPLTSQNLQQLSQQKPKNDASFSSEKESSAQPKVKSQVQETPKQLYKTELCESFTLKGSCPYGSKCQFAHGLGELKVKKSCKNFRTKPCVNWEKLGYCPYGRRCCFKHGDDNDIAVYVKAGTYCNVSSTSKQSDEKRSNGRGSAKKKNLNVKVKALQRMTW

SEQ ID NO: 105 - DNA, 4779 bp, Saccharomyces cerevisiae
atgggaacggatccccttattatccgaaataatggttcattttgggaagttgatgattttactcgtttaggaagaactcagctattgagctactatttaccattggctatcatagcctcaattggcattttcgcactttgtcgcagtggattatctcgttatgtaagatctgccgagtgcgatttagtgaacgaatatctatttggcgcacaagaagagagaaaagaagataatagtatagaaagacttctacggaactcaaatacccaagccaattacgtcaacgtcaaaaagcaaggaaggattttgaaacttagacattttgatataacaactatagatgtcaagcaaatcgatgctaaaaatcatggtggactaacgtttagtagaccgtctactagtgaccacttaagaaaatcatctgaaattgtattaatgtctttacaaataattggcctttcctttttaagagtaacaaaaatcaatattgaattaacgaacagagatgttacaactttactattattttggttaatactactttccctaagtatcttaagagtttacaagcgttcaacgaatctttgggccatctgttttactgcccatacaactatttggatttcaacctggattccaattcgttcggtctatattggtaatatcgatgatgtaccctcacagatattttacatctttgaattcgtaattacttcaaccttacagccaataaagctcacttcaccgattaaagacaactcatccatcatctacgttagagacgaccatacgtctccttcgagggaacacatatcctcaattttaagttgcattacttggagctggattaccaattttatatgggaggcccaaaagaacactattaagttaaaggatatttggggcttatcaatggaagactatagcattttcattctaaaagggtttaccaggagaaacaagcacattaataatttgacgctagcactgtttgaatctttcaaaacatatttactcataggaatgttatgggttctggtgaacagtattgtaaaccttcttcccacaattttaatgaaaagatttttagaaattgtggataacccaaaccgttcctcatcatgcatgaatttggcgtggctttatattattggtatgttcatttgtagattgacattagcaatttgtaattcccaaggtcaatttgtttctgataagatttgtttaagaataagagccatactcataggagaaatttatgcaaaaggcttacgtaggaggctgtttacatctccaaaaaccagctctgattcagatagtatctccgcaaaccttggtaccataattaatctcatttctattgactcatttaaggtatcggaactagcaaactacctttatgtgacagttcaggcagtaattatgataatagttgttgtaggactacttttcaactttttaggtgtttcagcttttgcaggaatttcaattatcttagtgatgttcccattgaatttcttgttagcgaatttgttaggtaagtttcaaaagcaaacactgaaatgtactgaccaaagaatctcaaaattgaacgagtgcttacagaacataagaattgtcaaatattttgcttgggaaaggaatattataaatgaaatcaaatcaataaggcaaaaggaattaagatccttattaaaaaaatctttggtgtggtccgtaacttcttttctttggttcgtgacaccgaccttggtgacaggtgtcactttcgccatctgtacatttgttcaacatgaagatttgaatgccccgcttgctttcactactttgtcactcttcactttgttaaagacacccctggatcaattatcaaatatgctaagtttcataaatcaatcaaaagtctctctaaaaagaataagcgattttttaaggatggacgatacagaaaaatataatcaactaaccatatctccagacaaaaataaaattgaatttaaaaatgcgactttaacctggaatgaaaatgacagcgatatgaatgcattcaaattatgtggtttgaatattaaatttcaaattggtaagttaaatttgattttgggttctacaggatctggtaaaagtgcattgctgctgggtttactgggtgaactaaatctaattagtggctctatcattgttccgagcttagaaccaaagcatgatttaattcccgactgcgaaggtttaaccaattccttcgcatattgttcacaaagtgcgtggctattaaatgacacggtaaaaaacaatattatctttgataacttctataacgaggataggtacaacaaagtaattgatgcatgtgggctgaaaagagacctggagattttaccagcaggtgacctaacagaaattggtgaaaagggtataactttatcaggagggcagaaacagagaatttccttggcgagagctgtttattcgagtgctaagcatgtcttactagatgattgtttgagcgctgtcgattcacatactgctgtatggatctatgaaaattgcatcacaggtccactaatgaaaaatagaacctgcattttagttacgcacaatgtttcattaacacttagaaatgcccatttcgcgattgtgttggaaaatggcaaagtgaagaatcaaggaactattacagaattacaaagcaaagggctttttaaggaaaaatatgttcaactttcttctcgagatagcattaatgaaaagaacgctaatagattaaaagctcccagaaaaaatgactctcagaaaatcgaacctgtcaccgagaacataaattttgatgcaaattttgtcaatgatggccagctaatagaagaggaagaaaaatcaaacggtgccataagccccgatgtttataaatggtacctgaaattttttggaggcttcaaagctttaacagccctgttcgctctttatatcacagctcaaattttgttcatcagtcagtcttggtggatacgacattgggtcaacgataccaatgtacgaataaatgctccaggttttgcgatggacacgctgccattaaaagggatgaccgactcttcgaaaaataaacataatgcattttattacttaaccgtatattttcttattggtatcattcaggcaatgctaggtggttttaaaacaatgatgacgtttttatccggtatgcgagcctccagaaagatctttaataatctgctagatctagttctacatgcccaaatacgatttttcgacgtgacgccggttggtagaatcatgaatcgcttttcaaaggacatcgaaggtgttgatcaagaattgattccatacttagaagtaactatattttgcctaattcaatgcgcatcaattatatttctcattaccgtaataactcctcgctttttgacagtcgccgttatcgtttttgttttatatttctttgtggggaaatggtacttaacggcaagtagagaattgaaaaggttagattcaataaccaaatcacccatttttcaacatttctcagagaccttggtaggcgtttgcacaattcgtgcatttggcgacgagaggagattcattttagaaaatatgaacaaaattgaccaaaataacagagcattcttttatttatcagttactgtcaaatggttttcttttagagtcgacatgattggcgcattcattgttttagcatcaggttcttttattctgctcaatattgcaaatattgactcgggtcttgccggcatttctttgacatatgccattttgtttacagatggtgctttatggttagttagactgtactcaacatttgaaatgaacatgaactctgttgaaagactaaaagaatattctagcattgaacaagagaactatcttggccatgatgaaggccgcattctacttctaaacgaaccatcgtggccaaaagatggagaaattgaaattgaaaacttatctttacgttacgcgccaaatttgcctcctgtcataagaaatgttagtttcaaagtggatcctcaaagtaagattgggattgtcggaagaactggcgcaggcaaatctaccataataacggcattattcagattactagaaccaataaccggatgtatcaaaatagatgggcaggatataagtaaaattgatctcgttacattacgtcgttccattactatcatccctcaggaccctattctatttgcaggtacaatcaaaagtaatgttgatccatatgatgaatatgatgaaaaaaaaatattcaaagcactttcacaagtaaatctaatttcttcacatgaatttgaagaagtgcttaactcggaggaacgctttaacagcactcataataaatttttaaatcttcacacagaaatagctgagggcggcttaaatctgtcccaaggtgaaaggcaattgctttttattgcacgatcattgttacgcgagccaaagataatacttttggacgaggctacttcctctattgattacgattctgaccatttaattcagggtattataagaagtgagtttaataaaagcacaattcttactattgcacatcgtttgagatctgttatcgattacgacaggataattgtgatggatgccggtgaggtaaaagaatatgatcgccctagtgaactgttgaaagatgaacgcggtatattttatagtatgtgtcgtgacagtgggggcctagagcttttgaagcaaatagccaagcaatcaagtaagatgatgaaataa

SEQ ID NO: 106 - protein, 1592 aa, Saccharomyces cerevisiae
MGTDPLIIRNNGSFWEVDDFTRLGRTQLLSYYLPLAIIASIGIFALCRSGLSRYVRSAECDLVNEYLFGAQEERKEDNSIERLLRNSNTQANYVNVKKQGRILKLRHFDITTIDVKQIDAKNHGGLTFSRPSTSDHLRKSSEIVLMSLQIIGLSFLRVTKINIELTNRDVTTLLLFWLILLSLSILRVYKRSTNLWAICFTAHTTIWISTWIPIRSVYIGNIDDVPSQIFYIFEFVITSTLQPIKLTSPIKDNSSIIYVRDDHTSPSREHISSILSCITWSWITNFIWEAQKNTIKLKDIWGLSMEDYSIFILKGFTRRNKHINNLTLALFESFKTYLLIGMLWVLVNSIVNLLPTILMKRFLEIVDNPNRSSSCMNLAWLYIIGMFICRLTLAICNSQGQFVSDKICLRIRAILIGEIYAKGLRRRLFTSPKTSSDSDSISANLGTIINLISIDSFKVSELANYLYVTVQAVIMIIVVVGLLFNFLGVSAFAGISIILVMFPLNFLLANLLGKFQKQTLKCTDQRISKLNECLQNIRIVKYFAWERNIINEIKSIRQKELRSLLKKSLVWSVTSFLWFVTPTLVTGVTFAICTFVQHEDLNAPLAFTTLSLFTLLKTPLDQLSNMLSFINQSKVSLKRISDFLRMDDTEKYNQLTISPDKNKIEFKNATLTWNENDSDMNAFKLCGLNIKFQIGKLNLILGSTGSGKSALLLGLLGELNLISGSIIVPSLEPKHDLIPDCEGLTNSFAYCSQSAWLLNDTVKNNIIFDNFYNEDRYNKVIDACGLKRDLEILPAGDLTEIGEKGITLSGGQKQRISLARAVYSSAKHVLLDDCLSAVDSHTAVWIYENCITGPLMKNRTCILVTHNVSLTLRNAHFAIVLENGKVKNQGTITELQSKGLFKEKYVQLSSRDSINEKNANRLKAPRKNDSQKIEPVTENINFDANFVNDGQLIEEEEKSNGAISPDVYKWYLKFFGGFKALTALFALYITAQILFISQSWWIRHWVNDTNVRINAPGFAMDTLPLKGMTDSSKNKHNAFYYLTVYFLIGIIQAMLGGFKTMMTFLSGMRASRKIFNNLLDLVLHAQIRFFDVTPVGRIMNRFSKDIEGVDQELIPYLEVTIFCLIQCASIIFLITVITPRFLTVAVIVFVLYFFVGKWYLTASRELKRLDSITKSPIFQHFSETLVGVCTIRAFGDERRFILENMNKIDQNNRAFFYLSVTVKWFSFRVDMIGAFIVLASGSFILLNIANIDSGLAGISLTYAILFTDGALWLVRLYSTFEMNMNSVERLKEYSSIEQENYLGHDEGRILLLNEPSWPKDGEIEIENLSLRYAPNLPPVIRNVSFKVDPQSKIGIVGRTGAGKSTIITALFRLLEPITGCIKIDGQDISKIDLVTLRRSITIIPQDPILFAGTIKSNVDPYDEYDEKKIFKALSQVNLISSHEFEEVLNSEERFNSTHNKFLNLHTEIAEGGLNLSQGERQLLFIARSLLREPKIILLDEATSSIDYDSDHLIQGIIRSEFNKSTILTIAHRLRSVIDYDRIIVMDAGEVKEYDRPSELLKDERGIFYSMCRDSGGLELLKQIAKQSSKMMK

SEQ ID NO: 107 - DNA, 1917 bp, Saccharomyces cerevisiae
atgaatcaacctcaaattggcacttacaatgtaggtacacagttaacagttgggtcacatcaggttgagatcattaaatatctaacaagcggtgggttcgctcaagtatattccgcgttaatcaacccacctgacccacattctaattcaagcgttgcatgcttaaaaagagtcattgttccagacaaacctagtctaaacactttaagagctgaagtagatgctatgaggttgctgaaaaacaataggtatgttgtatcttacattgattctcatgcagctaaggcaatgttacataatggttcgtatgaagtattcgtcttaatggaatattgtgaaagaggtggtctcattgattttatgaacacaaggctacaaaacaggcttcatgaatttgaaattttgcaaataatgagccaagttactcaaggagttgccgctatgcatgctttgcaacctccgttaattcaccgtgatataaagatagaaaatgttcttatctcagccaataatgagtacaagctttgtgactttggttctgtatgcggtattataaggcctcctaggaattcacaagagctatcatatgttcagcaagacattttgaaaaacacaactgcacagtaccggtcgccagagatgattgatacatttcgcggtctgccgatagatgaaaagtcggatatatgggcgctgggtatttttctatataagctttgctattacacaacaccgtttgaaaagggcggtgatcttgccatattaagcggaaagtttgaatttccattgtatccgaactacagtgaacagttgaaaggcttaatacgtgatatattggttcaagatccgcgccataggcctaacgtttatcaactactgaagaggatatcaattatgcaaaatgttccgtgtccaataaatgacatacaagtggttcaggcgcccagtagccatttgaatttgaccgaacttcatcagctttcggcaacacaaaatattctaagcttgaactctcccacaaccatggaaaatacgatgccgaacgctacatttcaaatcagcatggctgataatactacaacagcacaaatgcatcctaatagaaaaccatcacaaatagcatatgacgctagcttcagtaattccgccaaaggttctcaaccactttttgacaaatcacagaatatgtaccacgcattggatcctccacttgttgaaccgctagcgagtagtgtttcaaataatgacaacgaactcaaggcaaattccgcaaccaagttaaagcaggcaattgtctctgaagcacatacttttaggcagaataattcaatagactttccactacaaaacataataccccagtacgaagattcttcttcctcttcagatgaatcttattctggagacgtagatgaattaaagaaaactcgatctctaggttcttattccacacgcggtaacataaaaaaaaaccaatccgtaaaggaatctcttacttcatcaagcctaccaggcactagcttcaccccaacgtctacaaaggtaaatttgaaacacgaaaattcaccttttaagtcgacattcgttaatacgattgataattccaaagacgatcttaacaaaccatcttatgaagatttggacgtatctaagcagaatttgaagaactccattcaacagcgtatgatcgataaactcaactcttctgaggagtcattcaacgctaggaaaatgtccaaggtcaagctgcatgagaaaggggagatagataagccaacaatgctgaaatcaagtggcccgatttcaaaagacaaaaaaacaaaacctaccccaccacctaagccttcacatttaaagcctaaacctcctccaaaaccactgctcctcgcgggacgaaagttatccttggataagtga

SEQ ID NO: 108 - protein, 638 aa, Saccharomyces cerevisiae
MNQPQIGTYNVGTQLTVGSHQVEIIKYLTSGGFAQVYSALINPPDPHSNSSVACLKRVIVPDKPSLNTLRAEVDAMRLLKNNRYVVSYIDSHAAKAMLHNGSYEVFVLMEYCERGGLIDFMNTRLQNRLHEFEILQIMSQVTQGVAAMHALQPPLIHRDIKIENVLISANNEYKLCDFGSVCGIIRPPRNSQELSYVQQDILKNTTAQYRSPEMIDTFRGLPIDEKSDIWALGIFLYKLCYYTTPFEKGGDLAILSGKFEFPLYPNYSEQLKGLIRDILVQDPRHRPNVYQLLKRISIMQNVPCPINDIQVVQAPSSHLNLTELHQLSATQNILSLNSPTTMENTMPNATFQISMADNTTTAQMHPNRKPSQIAYDASFSNSAKGSQPLFDKSQNMYHALDPPLVEPLASSVSNNDNELKANSATKLKQAIVSEAHTFRQNNSIDFPLQNIIPQYEDSSSSSDESYSGDVDELKKTRSLGSYSTRGNIKKNQSVKESLTSSSLPGTSFTPTSTKVNLKHENSPFKSTFVNTIDNSKDDLNKPSYEDLDVSKQNLKNSIQQRMIDKLNSSEESFNARKMSKVKLHEKGEIDKPTMLKSSGPISKDKKTKPTPPPKPSHLKPKPPPKPLLLAGRKLSLDK

SEQ ID NO: 109 - DNA, 1686 bp, Saccharomyces cerevisiae
atgaacagagtaggggcagtgttcctatttgtatatgaaagaaatttttttttgtctattgttccagatcgtcacaggacggaaataagaatgtctagttcagaaaggtcagaagtcaagtttgacaagcactttaattggtggtccctattaggtatcgcgttctcattaagttgctcatgggtcggtatctcagcgtcgatggccgttggtattgccagtggagggccactgcttatcatctatgggttgataattgctgcttttttcagtctcatgtgtggtatatctctgggagattttgctgctatcctgccaaacagcagcggtggttcattttgggttcttaaaatgttggaacaagaatcagtcactttgaaaacccctgagtacgaggacccttctgacgatgatgaagaagtgttcctcgagaattattgtcaaactttcaacgtggaagtttcttctaaatttcaaaaggtttcttccatggttgtagggttgctgaactatttcggtgccatttttactaccgcaagtatctgctcatctttgtcaatgagctgtatcggtattcataagttgttgcatccggactacgagttaaagcactggcatgtttttgtgggttacgagtgtatcaatgccgttttgacacttttcaacatttattcaactccgttgccctatatctctcagtttgggctctatacgtctctattgtctttcgccatgactttcattatttgtattgtttcaagatctgacaacaccgtagacccatggcccaaagcttctaatatatttgggagctttgataatcaaacaggctggaattcgtctggaatggcgtttgttgtcggtttggtcaatccgatctgggcatttgttggcattgactctgctacgcacatgattgatgaagtgggttatagtaagtcacgtttcttagttcccaaagttattatcactaccatcattgtgggctttgtaactagttttatttattgcgttggtttgtttttctgcatcactgaccaaacggcagtcgttgagtctattttacctatcgtagaaatattttaccaggccactggtaataggaatctcagtgtcttcctgcaatgtatgtgtatcacaacaggttttgtttcaggcattgcaagtggaacctggcaaagtcgaatcctccaatcattcgggaaaagttacgcaccattttataaagagggttccttgggaaacaaatccttgaagaagctagcagtgttgacacctgggtttaagtctccattatatgcccattttttgtcacaaatatgtgtaacgataattggctgtatatttatgggatctagtaccgctttcaacgcaattatcactgcatgcatcaccctgttactaatgtcgtacgcagttccttcttttatattcctgttcgttattaaaaaggaaaaattcattcatagaatcgagagtgacgtaaattgtgtcagcaggcctaaccgtcgtcgtatgtctatgattcctcatattatatgtattctatggaccttgttctgcctggtatttttatctttcccatatacactaccggttactgcaggaaacatgaattacacctcagtagtgtatgcagtagttttctgcattatcagcatcgttgttttccctacatgcatctaa

SEQ ID NO: 110 - protein, 561 aa, Saccharomyces cerevisiae
MNRVGAVFLFVYERNFFLSIVPDRHRTEIRMSSSERSEVKFDKHFNWWSLLGIAFSLSCSWVGISASMAVGIASGGPLLIIYGLIIAAFFSLMCGISLGDFAAILPNSSGGSFWVLKMLEQESVTLKTPEYEDPSDDDEEVFLENYCQTFNVEVSSKFQKVSSMVVGLLNYFGAIFTTASICSSLSMSCIGIHKLLHPDYELKHWHVFVGYECINAVLTLFNIYSTPLPYISQFGLYTSLLSFAMTFIICIVSRSDNTVDPWPKASNIFGSFDNQTGWNSSGMAFVVGLVNPIWAFVGIDSATHMIDEVGYSKSRFLVPKVIITTIIVGFVTSFIYCVGLFFCITDQTAVVESILPIVEIFYQATGNRNLSVFLQCMCITTGFVSGIASGTWQSRILQSFGKSYAPFYKEGSLGNKSLKKLAVLTPGFKSPLYAHFLSQICVTIIGCIFMGSSTAFNAIITACITLLLMSYAVPSFIFLFVIKKEKFIHRIESDVNCVSRPNRRRMSMIPHIICILWTLFCLVFLSFPYTLPVTAGNMNYTSVVYAVVFCIISIVVFPTCI

SEQ ID NO: 111 - DNA, 621 bp, Saccharomyces cerevisiae
atgagtttcctaaacatttttacttttttcagcgtccttgtgtctgttgcaacagccgtcagatttgatttgactaacgtcacttgtaataacctacatggacctcactgtggtacctacgttatggaagtcgttggccaaaatggtacatttttgggtcaatctacgtttgctggtgccgacgttttaactgaaagcgctggtgacgcttgggcaagatatttgggccaggaaacaagattcctcccaaagttgactactattgctagcaatgatacgaagaacttttctccactaatcttcaccaccaatatctacacttgtaaccctcaatccattggtgatgctatggttccttttgctaacactgttactggtgaaattgaatacaactcttgggcagacaccgctgataatgcttccttcataaccggtttagctaaccaattgtttaactctactcagtatggcgttcaagttgcttcctgttacccaaactttgcttctgttattttgagcaccccaactgtgaacattttcgctgcgaatgagacattaccagattattgtaccgccatccagttgaaggccgtttgtccaccagacgctggttttgcttga

SEQ ID NO: 112 - protein, 206 aa, Saccharomyces cerevisiae
MSFLNIFTFFSVLVSVATAVRFDLTNVTCNNLHGPHCGTYVMEVVGQNGTFLGQSTFAGADVLTESAGDAWARYLGQETRFLPKLTTIASNDTKNFSPLIFTTNIYTCNPQSIGDAMVPFANTVTGEIEYNSWADTADNASFITGLANQLFNSTQYGVQVASCYPNFASVILSTPTVNIFAANETLPDYCTAIQLKAVCPPDAGFA

SEQ ID NO: 113 - DNA, 372 bp, Saccharomyces cerevisiae
atgaatattaattattattattgttataaatctatatgctcgtggatttttttaaataaattagacttacctgttatttacaagacttcttcgtttgacattagtccggcctgtgattctatgtcttgctcacctgcaatagcccgcgtagaaaaaagccttgaccaaaaattcccaatcgaaaatttggacttgaaatctgaaatcccatgtgattcaatatccggtggagtccacttcttcaacatcaatgaacttagaacgacactgaccgagctgaatgccatcgctaaaccggcgagcattggaggaagagttatgccccaaggaatgagcacacccatagcaatcggaatcatgaatatattatag

SEQ ID NO: 114 - protein, 123 aa, Saccharomyces cerevisiae
MNINYYYCYKSICSWIFLNKLDLPVIYKTSSFDISPACDSMSCSPAIARVEKSLDQKFPIENLDLKSEIPCDSISGGVHFFNINELRTTLTELNAIAKPASIGGRVMPQGMSTPIAIGIMNIL

SEQ ID NO: 115 - DNA, 1305 bp, Saccharomyces cerevisiae
atgaagactcagtactctctaatacgaaaaatttgggcacattcagtaacagaatttctgaaatcccagtggtttttcatctgtttggctattttaatcgttattgcaagatttgctccgaattttgcaagagacggagggttaattaaaggccaatatagtattgggtacggctgcgtcgcctggatttttctccaaagtggcctgggaatgaaatcaaggtcactaatggcaaatatgttaaattggagagctcatgccactattctggttctgagtttccttattacctcgtccatagtatatggattttgttgcgcggtaaaggctgctaatgatccgaaaatagatgactgggtacttatcggtctaattttgactgccacttgtccaacaaccgtggcttcaaacgttatcatgactacgaatgcaggtggaaatagccttttgtgcgtttgtgaagtattcattggaaatttgttgggtgcgtttattacacctgcattggttcaaatgtttactaaccgcgcaccatttgcatacggcaaccctgccactggaaatggcattggtgcgctttatggccgtgttatgaaacaggttggtctctctgtattcgtacccttgtttgtgggtcaggttattcaaaattgctttccgaagggtactgcttattacctgggctttttgaaaaaataccatattaaaattggatcttacatgcttttattgattatgtttagttcattctcaactgccttttatcaggatgcgtttactagcgtttctcatgtttgcatcatatttctctgcttttttaatttgggaatttatatattcttcacgggtctgtcatacttatgtgcaaggccatggttcatcctcaagcttttccctcatgaaccaatagagggcaaatctacaagattgtaccgctattcgtataatatctttaggcctttttattattcaaaggaagatgcgatttgcattatgttttgtggcccggctaaaactgcagcactgggtgtatcactaattacttcacaatacggcgataaaaaagaacacctgggtaagttgttggttcccttggttttatatcaagttgagcaagtcatgacggcaaatttctttgtaagcttgttcaaaagatggatacaaaaggacgctcaagcagacggaagcgagtcatcttgtgcaaatgagaatgaggaagttgatttggaaaagatcatatcaattggaactggtgaaaatcaatccgttctgtcgaacaacgtcccatatacacaaccaaggtga

SEQ ID NO: 116 - protein, 434 aa, Saccharomyces cerevisiae
MKTQYSLIRKIWAHSVTEFLKSQWFFICLAILIVIARFAPNFARDGGLIKGQYSIGYGCVAWIFLQSGLGMKSRSLMANMLNWRAHATILVLSFLITSSIVYGFCCAVKAANDPKIDDWVLIGLILTATCPTTVASNVIMTTNAGGNSLLCVCEVFIGNLLGAFITPALVQMFTNRAPFAYGNPATGNGIGALYGRVMKQVGLSVFVPLFVGQVIQNCFPKGTAYYLGFLKKYHIKIGSYMLLLIMFSSFSTAFYQDAFTSVSHVCIIFLCFFNLGIYIFFTGLSYLCARPWFILKLFPHEPIEGKSTRLYRYSYNIFRPFYYSKEDAICIMFCGPAKTAALGVSLITSQYGDKKEHLGKLLVPLVLYQVEQVMTANFFVSLFKRWIQKDAQADGSESSCANENEEVDLEKIISIGTGENQSVLSNNVPYTQPR

SEQ ID NO: 117 - DNA, 2136 bp, Saccharomyces cerevisiae
atgcattggacgtccatcttgagcgctattttgcttttctgcctgtcaggagcaagagcatcacctgcaaagacagttattcgtaacaaggtgcccttgcttgtcactaatgcctgcacgaggatttttcaaaaagttacttgggagtataccagcaagtctaagcgttcatcaccagtatgttcttacgaaccagcgtttcaatcaatgctgtattgtatctatgaaacgttggatgaaaaaggttattcgaataaaaccttagaaaaaacatttagtaccatcaaaaaaaactgtgcaagttatagtgatgctcttcagaacatgactaattctgagttttatgacgttctaaacaacggaacgaggcatatgacgccctatgtcaaaggcagtgcaaacctaacatatccagttgaaatggatacacagttaagaaaagcctactatcatgcattgcatggtttctatgctaacttagatgtcggaaacatatatggtggcattatatgtgcttattttgtcgctatcatggcttttgcaggcgttcttcattgcatgaattacactccctttaaaactgttctattgaagcaaaagcttgtgggatatgtaaggggatacctcactctacctaccattggaagcaaacatgcgtcagatttctcttattttagaatattcacaggatatttacctacaagattagagggtatcattattcttggatatctcgtgcttcataccgtttttttggcatacggttatgaatacgatcctgaaaatataatattcaagtctcgtagagttcaagttgctcgatatgtggcagacagaagtggtgtactcgcattcgcacactttccattaatagttcttttcgcgggaagaaacaactttctcgagtatatttctggggttaaatatacttccttcattatgtttcacaaatggttgggaagaatgatgtttttggatgctatgattcatggctctgcatatactagttatacggtagcgaataaaacttgggcaacaagtaaaaaccgattatattggcaattcggggtggcagcactttgtttagctggcacaatggttttcttttcctttgcagtattcaggaagtatttttatgaagcctttctttttcttcatatcgtccttggtgcaatgttcttttatgcatgttgggagcatgttgttagtttaagtggcattgagtggatatacactgctattgcgatttggatcgttgaccggattattagaattatcaaagcttcttattttggtttccccaaagcttccctacaactaatcggggatgatctcattcgtttaacagttaaaaaaccggcaaggccatggagggccaaacctgggcaatatgttttcgtttcgtttttacatccactgtacttctggcagtcacatccatttactgttttggattcagtaagcaagaatggtgaactggttattatcctgaaagaaaaaaagggagtaacaagacttgtcaaaaagtatgtgtgtcgcaatggaggtaagacatctatgagactagctatagaaggtccatatggttcttcatctccggtcaataattacaataatgtattgttactcactggaggtaccggtttgcctggacctattgcacatgcaattaaacttggaaagacgtcagcggctgctggaaaacaatctgtaaaattagtgattgcagttagaggattcgacgtactcgaggcttataagccggagttgatgtgtttagaaaatctgaatgtacagcttcacatctacaacacaatggaagtcccatcattaacccctagtgatagtttagatatttctcaacaggatgagaaggctgatgaaaaaggcactgttgtggcaactactttagaaaagtctgccaatccacttggttttgatggtgttgttttccattgcgggcgaccaaatgttaaggaacttctacatgaagcggctgaattgagtggctcattatctgtggtttgctgtggacctcctatttttgttgacaaagtgaggaatgaaaccgcaaaaatagttttagataagtctgcaaaagccattgagtactttgaagagtatcaatgctggtga

SEQ ID NO: 118 - protein, 711 aa, Saccharomyces cerevisiae
MHWTSILSAILLFCLSGARASPAKTVIRNKVPLLVTNACTRIFQKVTWEYTSKSKRSSPVCSYEPAFQSMLYCIYETLDEKGYSNKTLEKTFSTIKKNCASYSDALQNMTNSEFYDVLNNGTRHMTPYVKGSANLTYPVEMDTQLRKAYYHALHGFYANLDVGNIYGGIICAYFVAIMAFAGVLHCMNYTPFKTVLLKQKLVGYVRGYLTLPTIGSKHASDFSYFRIFTGYLPTRLEGIIILGYLVLHTVFLAYGYEYDPENIIFKSRRVQVARYVADRSGVLAFAHFPLIVLFAGRNNFLEYISGVKYTSFIMFHKWLGRMMFLDAMIHGSAYTSYTVANKTWATSKNRLYWQFGVAALCLAGTMVFFSFAVFRKYFYEAFLFLHIVLGAMFFYACWEHVVSLSGIEWIYTAIAIWIVDRIIRIIKASYFGFPKASLQLIGDDLIRLTVKKPARPWRAKPGQYVFVSFLHPLYFWQSHPFTVLDSVSKNGELVIILKEKKGVTRLVKKYVCRNGGKTSMRLAIEGPYGSSSPVNNYNNVLLLTGGTGLPGPIAHAIKLGKTSAAAGKQSVKLVIAVRGFDVLEAYKPELMCLENLNVQLHIYNTMEVPSLTPSDSLDISQQDEKADEKGTVVATTLEKSANPLGFDGVVFHCGRPNVKELLHEAAELSGSLSVVCCGPPIFVDKVRNETAKIVLDKSAKAIEYFEEYQCW

SEQ ID NO: 119 - DNA, 1884 bp, Saccharomyces cerevisiae
atggagtctgttcactctcgcgatcctgttaaggaggaaaagaaacatgtcttcatgggaatggaacacgagttgaatcctgagactcataacgattccaactccgactcatatggtctccctcagttatctgaaaaatacaatgccttgagacagaacaggagcctaattatccagcagactgaaatcattggctctgcttacaataaatggtacttacaagcgattttacttttgagtgctttcatatgtggctacggttatggactggacggtaacatccgttatatttacactggttacgccacatcatcctatagtgagcattctctgctgtctacaatcaacgtcattaatgctgtggtcagtgccgcttcgcaaatcatatacgctaggttgtctgatgtgtttggtagactataccttttcattagtgctgtcatcctatatgttgtgggtacaattattcaatcacaagcttatgatgttcaaagatacgctgcaggtgccattttctacaatgctggctatgtgggtgtaatccttattcttttgattatcctatccgatttttcatctttaaagtggagactgctgtatcaatttgtcccgacttggccttttatcatcaacacatggattgctggtaatatcacttccagagccaatcctgttgtcaactggtcttgggatgtaggtatgtgggctttcatctttcccctatcatgtgttccaatcgttttgtgtatgttgcacatgcaatggagggccagaaagactcctgaatggcacgctttgaagggccagaagtcctattatcaagaacatggttttattaagatcttaaagcaattattttggatgttagatgtcgttggtgtccttttgatgggttgttccctaggttgtatcttggtcccactgaccttggctggtggggtcaaaactacctggaatgattcaagattgatcggcccctttgttcttggctttgttttgatccctatcttatggatttgggaatatcgattcgctagagatccaattcttccatataggctggtcaaagatagggctgtatggtcttctatgggtatttctttcctgattgattttatttactatatggccgctgattatttgtacacggttatgattgttgccgtcaatgaatccgttaaatctgcaaccagaattgccacattatcttcatttgtctctactgtggcctctccatttttcgctttacttgtaacaagatgtacgagattgaaaccattcataatgtttggatgcgcgctatggatggtggctatgggtttattgtaccactttagaggtggaagtcagtcccattcaggtattattggtgcattatgtgtctggggtgtgggcactactttgttcacttacccagttaccgtctctgtacaatctgccgtctctcatgaaaacatggcgacagttacagctttaaactataccctctatagaattggttctgctgtcggttccgcagtttccggtgccatttggactcagactttgtacaaacaaattttgaagagaatgggtgatgttgctctagccacaactgcctacgaatctccatatactttcattgaaacctatacttggggtaccccacaaaggaatgccttaatgaacgcttacaaatacgttcaaagattggaaactatcgtggctttagtattttgtgttccattaattgcattctccttatgtctaagggatcctaaattgactgatactgttgctgtggaatacatcgaggatggcgaatatgtcgacacgaaagacaatgatccaattttggattggtttgaaaaacttccatcaaaattcacttttaaacgggaataa

SEQ ID NO: 120 - protein, 627 aa, Saccharomyces cerevisiae
MESVHSRDPVKEEKKHVFMGMEHELNPETHNDSNSDSYGLPQLSEKYNALRQNRSLIIQQTEIIGSAYNKWYLQAILLLSAFICGYGYGLDGNIRYIYTGYATSSYSEHSLLSTINVINAVVSAASQIIYARLSDVFGRLYLFISAVILYVVGTIIQSQAYDVQRYAAGAIFYNAGYVGVILILLIILSDFSSLKWRLLYQFVPTWPFIINTWIAGNITSRANPVVNWSWDVGMWAFIFPLSCVPIVLCMLHMQWRARKTPEWHALKGQKSYYQEHGFIKILKQLFWMLDVVGVLLMGCSLGCILVPLTLAGGVKTTWNDSRLIGPFVLGFVLIPILWIWEYRFARDPILPYRLVKDRAVWSSMGISFLIDFIYYMAADYLYTVMIVAVNESVKSATRIATLSSFVSTVASPFFALLVTRCTRLKPFIMFGCALWMVAMGLLYHFRGGSQSHSGIIGALCVWGVGTTLFTYPVTVSVQSAVSHENMATVTALNYTLYRIGSAVGSAVSGAIWTQTLYKQILKRMGDVALATTAYESPYTFIETYTWGTPQRNALMNAYKYVQRLETIVALVFCVPLIAFSLCLRDPKLTDTVAVEYIEDGEYVDTKDNDPILDWFEKLPSKFTFKRE

SEQ ID NO: 121 - DNA, 222 bp, Saccharomyces cerevisiae
atggcagagataaaacattatcaattcaatgtcgtcatgacctgctcgggatgttctggtgcagtcaataaagttttgacgaaattagaaccagacgtttccaaaatagatatatcccttgaaaagcaattagtagatgtatatactacacttccttacgattttattttagaaaagattaagaaaaccggaaaggaagttagatctggcaaacaattgtga

SEQ ID NO: 122 - protein, 73 aa, Saccharomyces cerevisiae
MAEIKHYQFNVVMTCSGCSGAVNKVLTKLEPDVSKIDISLEKQLVDVYTTLPYDFILEKIKKTGKEVRSGKQL

SEQ ID NO: 123 - DNA, 1821 bp, Saccharomyces cerevisiae
atgctggaaactgatcactctaggaatgacaatttagacgataaaagcactgtctgctacagcgaaaagacagatagcaatgttgagaagtctaccacgtctggcttgcgccgtatagacgctgtcaacaaggtcttgtctgactacagctctttcacagcttttggagttacgtttagttcactcaagaccgccctactggtggctctgtttttgcagggttactgtactggactcggagggcagatttcgcaatcaatacaaacctatgccgctaacagttttggaaagcattctcaagtaggatcgatcaataccgtcaaatcaatagtagcctctgttgtcgcagtgccatacgcacgtatatctgatcggtttggacgtatagaatgctggatttttgcgcttgtgctctatactattggagaaattatttctgctgctactccaacgttttccggactttttgcaggtattgttatacaacagttcggttattctggatttcgtcttcttgctacagcactgactggtgatctgtctggattgagagatcgtacatttgcgatgaacatatttctgattcccgtgattataaacacatgggtaagtggaaatattgttagctcagttgctggtaatgttgcaccatataaatggcgttggggctatggaattttttgcatcattgtgcccatctccaccctaatattggtccttccctatgtgtatgctcagtacatttcctggcgcagcggtaagttaccaccattaaaattgaaagaaaaaggacagaccctgcgtcaaacgctctggaaatttgcggatgacataaacttaattggagtcattcttttcactgctttcttagttttagtattattacctctcacaatagctggtggagccacctccaaatggagagagggtcacattattgcaatgattgtggttggtggctgcttaggttttatctttctaatttgggaattaaaatttgctaagaatccatttatcccacgagtatatctaggtgatccaaccatctacgttgcattgctaatggaatttgtatggcgtctaggtttgcagattgagttagagtatttggtcaccgtgttaatggtagcattcggagaatcaacattaagtgcgcagcggatagctcagctttacaattttctacagtcatgcactaatattgttgtcggcattatgctgcatttctatcctcatccgaaagtctttgtagtcgctgggtcgcttcttggtgtcatcggaatgggtcttttgtacaaatacagggtggtatatgacgggatttcgggtcttattggcgctgagattgtggtcggtatagctggtggtatgatacgttttcctatgtggacgctagtgcacgcttcaaccacccacaatgagatggcaactgtcactgggttactaatgtccgtttatcaaatcggagacgcagtaggtgcttccatcgctggtgctatatggactcagcgtctggcaaaggagttgatacagcgactcggctctagtttagggatggcaatctacaaatcaccactcaattatctaaaaaaataccctattggatcagaggttcgtgttcagatgatagaatcctattcgaagattcaacgcttattgataattgtgtccatttcgtttgcggctttcaatgctgttctctgttttttcttgcgtggctttactgtaaacaagaagcaaagtctttccgcagaagaacgagagaaagagaagctcaaaatcaaacaacaatcatggctccgtcgtgtaattggatattga

SEQ ID NO: 124 - protein, 606 aa, Saccharomyces cerevisiae
MLETDHSRNDNLDDKSTVCYSEKTDSNVEKSTTSGLRRIDAVNKVLSDYSSFTAFGVTFSSLKTALLVALFLQGYCTGLGGQISQSIQTYAANSFGKHSQVGSINTVKSIVASVVAVPYARISDRFGRIECWIFALVLYTIGEIISAATPTFSGLFAGIVIQQFGYSGFRLLATALTGDLSGLRDRTFAMNIFLIPVIINTWVSGNIVSSVAGNVAPYKWRWGYGIFCIIVPISTLILVLPYVYAQYISWRSGKLPPLKLKEKGQTLRQTLWKFADDINLIGVILFTAFLVLVLLPLTIAGGATSKWREGHIIAMIVVGGCLGFIFLIWELKFAKNPFIPRVYLGDPTIYVALLMEFVWRLGLQIELEYLVTVLMVAFGESTLSAQRIAQLYNFLQSCTNIVVGIMLHFYPHPKVFVVAGSLLGVIGMGLLYKYRVVYDGISGLIGAEIVVGIAGGMIRFPMWTLVHASTTHNEMATVTGLLMSVYQIGDAVGASIAGAIWTQRLAKELIQRLGSSLGMAIYKSPLNYLKKYPIGSEVRVQMIESYSKIQRLLIIVSISFAAFNAVLCFFLRGFTVNKKQSLSAEEREKEKLKIKQQSWLRRVIGY

SEQ ID NO: 125 - DNA, 1887 bp, Saccharomyces cerevisiae
atggaccctggtattgctaatcataccctccccgaggaatttgaagaggttgtcgttcccgagatgctggaaaaggaagtaggagccaaggtcgatgtcaagccaacgctaaccacatcttctccagcaccttcttacattgaattgatagatccaggtgtgcataacatcgagatttacgcagaaatgtacaaccgcccgatctaccgtgtcgcattattcttctcacttttcctcattgcctatgcttacggattagatggtaatatccgttacactttccaggcgtacgcgacttcgtcgtactcccagcactcgctgctatcgaccgtcaactgtattaagacggttattgcggctgtaggccagatcttctttgccagattatcagatatcttcggcagattttccattatgattgtcagtatcattttttatagcatggggaccatcattgagtcgcaagcggtgaatattacaagatttgcagttggtggttgtttttaccaattgggtcttaccggtattattctaattttggaagttattgcttctgacttttccaacttgaactggaggttgttagccttattcattccagctttaccatttatcatcaacacctggattagcgggaacgtaacaagtgccatagatgctaattggaaatggggtattggtatgtgggcttttatactgccgctagcttgtattccgcttggaatttgtatgttgcacatgaggtatttagcaagaaagcatgctaaagatagattgaagcccgagttcgaagcgctaaacaaattgaagtggaagtccttttgtatagacatcgcattttggaaattggatatcattggaatgttattaattactgtatttttcgggtgtgtattggttccattcaccttagcgggtggtttgaaagaggaatggaaaactgcgcatattattgtccctgaagtcattggttgggttgtagtgttaccactgtacatgctatgggaaataaagtactcgagacatccattgacaccttgggacttgattcaagatagaggtatctttttcgctctactcatcgcattctttatcaattttaactggtatatgcaaggtgattacatgtatactgtactagtcgttgcagttcatgaatccataaagtccgctacaagaattacctccttgtattcatttgtttctgttatcgttggtacaatcctcgggttcatactgattaaagttagaaggactaagccttttattatatttggcatttcttgttggatcgtctcatttggtttgctggtccattaccgtggtgactccggtgctcattccggtatcattggctctttgtgtctattaggtttcggtgcaggttcatttacctatgtgactcaagcttccatccaagcatccgctaaaactcatgcaagaatggcggtagtaacctcattataccttgccacttataatattggttctgcatttggtagttctgttagcggagctgtctggactaatatcctacccaaagaaatttcaaaaagaatttccgatccaaccttagctgcacaagcgtacggttctccatttacattcattacaacttatacctggggaacaccagaaagaatagctttagtcatgtcttaccgctatgttcaaaagattttatgtatcataggtttggtattctgctttcctttgttaggttgcgcattcatgttgagaaatcataaactaacagattctattgctcttgaaggcaatgatcatttggaaagtaaaaacacctttgaaattgaggaaaaggaagaaagttttttgaaaaataaattctttacgcactttacaagcagtaaagataggaaagattaa

SEQ ID NO: 126 - protein, 628 aa, Saccharomyces cerevisiae
MDPGIANHTLPEEFEEVVVPEMLEKEVGAKVDVKPTLTTSSPAPSYIELIDPGVHNIEIYAEMYNRPIYRVALFFSLFLIAYAYGLDGNIRYTFQAYATSSYSQHSLLSTVNCIKTVIAAVGQIFFARLSDIFGRFSIMIVSIIFYSMGTIIESQAVNITRFAVGGCFYQLGLTGIILILEVIASDFSNLNWRLLALFIPALPFIINTWISGNVTSAIDANWKWGIGMWAFILPLACIPLGICMLHMRYLARKHAKDRLKPEFEALNKLKWKSFCIDIAFWKLDIIGMLLITVFFGCVLVPFTLAGGLKEEWKTAHIIVPEVIGWVVVLPLYMLWEIKYSRHPLTPWDLIQDRGIFFALLIAFFINFNWYMQGDYMYTVLVVAVHESIKSATRITSLYSFVSVIVGTILGFILIKVRRTKPFIIFGISCWIVSFGLLVHYRGDSGAHSGIIGSLCLLGFGAGSFTYVTQASIQASAKTHARMAVVTSLYLATYNIGSAFGSSVSGAVWTNILPKEISKRISDPTLAAQAYGSPFTFITTYTWGTPERIALVMSYRYVQKILCIIGLVFCFPLLGCAFMLRNHKLTDSIALEGNDHLESKNTFEIEEKEESFLKNKFFTHFTSSKDRKD

SEQ ID NO: 127 - DNA, 1914 bp, Saccharomyces cerevisiae
atgatcgaagtcccagaagacaatcgttctagccaaacaaagcgtaagaatactgaaaaaaattgtaatgaactgatggttgatgaaaagatggatgacgattcgtcgcccagagatgaaatgaaagataaattaaagggaacaaaatcattgattattcgtaagtctgagctaatggctaaaaagtatgatacttggcaattaaaagctatattcctgttttctgcattcatttgcactttcgcttatggattagatagcagcataaggggtacatatatgacctacgcaatgaactcgtactccgcacattctctcatttctacagtaagcgtcatagttctaatgatatctgctgtttcacaggtgatctttggagggttatcagatatctttggaaggctaacgttgtttcttgtatccattgtactttacattgtgggtacaataattcaatctcaagcatatgatgtccagaggtatgctgctggagctgtcttttattatgtgggacttgtcggtgttatgctacaggttgttttgatgttgtctgataattcttcattaaaatggaggctattttacacattgataccttcatggccctcgattatcactacgtgggtctcaggtagtgtagtggaggcagcaaacccgttagagaactggtcgtggaatattgctatgtgggcgttcattttccctctatgctgtatcccattgattttgtgtatgctccatatgagatggaaagtaagaaatgacgtggaatggaaagaattacaggatgaaaaatcgtactatcaaacgcacggattagtacaaatgctggtacagttgttctggaagctagatgttgtcggtgtgttgttgtttactgctggtgttggttgtattcttgtaccactcactcttgctggtggcgtctctacaaattggagaaattcaaagattatcgggccctttgtgcttggctttgtcctggttccaggcttcatatattgggaaagtcgacttgctttggttcctttcgctccattcaagctgctaaaagatcgtggcgtgtgggccccattgggaattatgttttttatctgctttgtatatcaaatggctgctgggtatctctacaccattctagtagttgcggtagatgagagcgcttcctcagctacaagaataataaacttatactcttttgtgactgctgttgttgctccatttctggggctcatcgttacgagatcatctagattgaagtcgtatattatttttggtggctcactttatttcattactatgggactattttaccgctacaggtcaggtcaagacgccgatggaggtataattgctggtatggttatttggggtctcagtagttgtttattcgattatcctacaattgtttctattcagtcggtaacatcccatgagaatatggctactgtcacagcattaaactatacagttttcagaataggtggagcagttgcagctgccatttccggtgccatatggacgcagtcattgtaccctaaattattgcactacatgggagacgctgacctggctacagcagcatatggctcaccactaacttttattctttccaatccctggggtactccagttaggtctgcgatggttgaagcttacagacacgttcaaaaatacgaagttattgttgcgcttgtattttcagcgcctatgttccttctaacattctgcgtaagagatcctcggttgactgaagattttgcccaaaagttacctgacagagaatatgtccaaaccaaggaagatgatcctatcaatgactggatcgcgaaacgttttgcaaaggccttaggaggtcataagaaagatttacaaaaccccaacaggatatgtgttcgaaaaaatgatctctga

SEQ ID NO: 128 - protein, 637 aa, Saccharomyces cerevisiae
MIEVPEDNRSSQTKRKNTEKNCNELMVDEKMDDDSSPRDEMKDKLKGTKSLIIRKSELMAKKYDTWQLKAIFLFSAFICTFAYGLDSSIRGTYMTYAMNSYSAHSLISTVSVIVLMISAVSQVIFGGLSDIFGRLTLFLVSIVLYIVGTIIQSQAYDVQRYAAGAVFYYVGLVGVMLQVVLMLSDNSSLKWRLFYTLIPSWPSIITTWVSGSVVEAANPLENWSWNIAMWAFIFPLCCIPLILCMLHMRWKVRNDVEWKELQDEKSYYQTHGLVQMLVQLFWKLDVVGVLLFTAGVGCILVPLTLAGGVSTNWRNSKIIGPFVLGFVLVPGFIYWESRLALVPFAPFKLLKDRGVWAPLGIMFFICFVYQMAAGYLYTILVVAVDESASSATRIINLYSFVTAVVAPFLGLIVTRSSRLKSYIIFGGSLYFITMGLFYRYRSGQDADGGIIAGMVIWGLSSCLFDYPTIVSIQSVTSHENMATVTALNYTVFRIGGAVAAAISGAIWTQSLYPKLLHYMGDADLATAAYGSPLTFILSNPWGTPVRSAMVEAYRHVQKYEVIVALVFSAPMFLLTFCVRDPRLTEDFAQKLPDREYVQTKEDDPINDWIAKRFAKALGGHKKDLQNPNRICVRKNDL

SEQ ID NO: 129 - DNA, 3201 bp, Saccharomyces cerevisiae
atggtaaagcagcagggatccggcaagaccaacttggccaacgaagatgaagcatatgaagctatttttggcggagagtttggctctttagaaatcgggtcatacattggcggggatgaaggtgccaattcaaaggactatacggagcatttgccggatgctgtagattttgaagatgaagatgaacttgctgatgacgatgacgatttgccagaagaatctgatgctaatttgcatccagctatgatgactatgggcgcgtatgatgatgtaaacgagaacggtgccgtactcggtatcgactcaaatagtttgaatatgcaactgcctgaaattaatggtgatttgtctcaacagtttattttggaggatgatgggggtactcccgcaactagcaatgctttgtttatgggaatggatgcaaatgaaattcatctcgccactgaaactggagttcttgatggtagtggcgcaaatgaaattgggcattctcaactttccattggtggcgttaatggaaatgatatgtcgataaatggcggatttatcatggaaccagatatgtcagatggcaagcataagaaagccaccaaattagacttgataaaccatgagaagtatcttctaaaaaaatactttcctgattttgaaaagggtaaaattttaaaatggaacaagctgatttatagaagatctgttccttatcattggcacagtgaaatatctagggtaaagaaaccgtttatgcctttaaatttgaaattcaaggttcaacaggatgataagaggttatttaactcaaggacaatatcttacgtcgctccgatttatcaagggaaaaacaatttacttcaaagtaactcttctgcatcccgaagaggtttaattcatgtttccattgatgaacttttccctattaaagagcaacaaaaaaaaagaaagattattcatgatgaaaagaccatatcggaagacttgcttattgccactgatgattgggaccaagaaaaaatcatcaatcaaggtacttcatcaacagcaaccttggcggattcgtctatgacacccaacttaaagttctccggcggttataaattgaagagcttgattgaggatgttgctgaagattggcagtgggatgaagacatgatcattgatgcaaaattgaaagagtctaaacatgctgaattaaatatgaatgacgaaaaactgttgctgatgattgagaaaacgaataatttagcgcagcaaaagcaacaactggatagtagtaacttgatattgcccctcaacgaaactattttgcaacaaaaattcaatttatctaatgatgataaatatcaaatcttgaaaaaaacccatcaaacaaaagttcgttctaccatctcgaacttaaatattcagcattctcaacctgcgattaatttacaatctccattttacaaagtggctgttcctagataccagttgaggcatttccaccgtgaaaactttggttcgcacatcagaccaggtactaaaattgtcttcagtaagttaaaagcgcgtaaaaggaaaagagataaaggtaaagatgtcaaagaatcattttctacatctcaagatctaaccatcggggatactgctcctgtttatttaatggaatattctgaacaaacaccggtagctttgtctaaatttggtatggccaataaattaattaattattatcggaaagccaatgaacaagatactctaaggcccaaattgcctgttggcgaaactcacgttttgggagttcaagacaaatcaccattttggaactttggatttgttgaacctggtcatatcgtccccacattatacaataacatgattagagcacccgttttcaaacatgatatatcaggaacagattttcttctgacaaaaagttccggatttggtataagcaatcgattttacttacgtaatattaaccatctttttacggttggacaaacttttcctgtcgaggagattcccggacctaattcaagaaaggtgacatcaatgaaagctacaagactgaaaatgattatttatagaattctaaaccataatcacagcaaggcaatttctattgatcccattgcaaagcactttcccgaccaagattatggacaaaacagacaaaaagtgaaggagttcatgaaatatcaaagagatggtcctgaaaaaggtctgtggaggcttaaagatgatgaaaaattgttagacaatgaagcagtgaaaagtttaattacgccagagcagatcagccaagttgaatcaatgagtcagggcttacaattccaagaagataatgaagcatataattttgattctaagctaaaatctctagaagaaaacttgttaccatggaacattacaaaaaattttattaattcaacacaaatgcgagctatgatacaaatacatggtgttggtgacccaacgggctgtggtgaaggtttttctttcttgaaaacttcaatgaaaggtggttttgttaagtctggttctccttccagtaataacaatagttcaaacaaaaaaggcactaacacgcatagctacaatgtggctcaacagcaaaaagcttacgacgaagaaattgcgaagacctggtatacacatacaaaatcgttgagcataagcaatccttttgaggaaatgaccaatcctgatgagattaatcagaccaacaagcatgttaagacggatagagatgataagaaaattctgaagattgttagaaagaaaagagatgaaaatggtataattcaaaggcagacaattttcataagagatcctagggtcattcaaggatatataaaaatcaaagaacaggataaagaagatgttaacaaattgttagaggaggacacttcaaagataaataacttggaagaacttgagaaacagaaaaaactgttgcaactagaattagctaatttggaaaaatcacagcaacgtagagcagcaaggcaaaattcgaagagaaatggtggtgccacgagaacagaaaactctgtggataatggtagcgaccttgccggtgtaactgacgggaaagcagccaggaataaaggtaagaacactacaaggagatgtgctacatgcggacaaatcgggcacattagaacaaataaatcttgtccaatgtatagcagtaaagataaccctgcttcaccaaagtag

SEQ ID NO: 130 - protein, 1066 aa, Saccharomyces cerevisiae
MVKQQGSGKTNLANEDEAYEAIFGGEFGSLEIGSYIGGDEGANSKDYTEHLPDAVDFEDEDELADDDDDLPEESDANLHPAMMTMGAYDDVNENGAVLGIDSNSLNMQLPEINGDLSQQFILEDDGGTPATSNALFMGMDANEIHLATETGVLDGSGANEIGHSQLSIGGVNGNDMSINGGFIMEPDMSDGKHKKATKLDLINHEKYLLKKYFPDFEKGKILKWNKLIYRRSVPYHWHSEISRVKKPFMPLNLKFKVQQDDKRLFNSRTISYVAPIYQGKNNLLQSNSSASRRGLIHVSIDELFPIKEQQKKRKIIHDEKTISEDLLIATDDWDQEKIINQGTSSTATLADSSMTPNLKFSGGYKLKSLIEDVAEDWQWDEDMIIDAKLKESKHAELNMNDEKLLLMIEKTNNLAQQKQQLDSSNLILPLNETILQQKFNLSNDDKYQILKKTHQTKVRSTISNLNIQHSQPAINLQSPFYKVAVPRYQLRHFHRENFGSHIRPGTKIVFSKLKARKRKRDKGKDVKESFSTSQDLTIGDTAPVYLMEYSEQTPVALSKFGMANKLINYYRKANEQDTLRPKLPVGETHVLGVQDKSPFWNFGFVEPGHIVPTLYNNMIRAPVFKHDISGTDFLLTKSSGFGISNRFYLRNINHLFTVGQTFPVEEIPGPNSRKVTSMKATRLKMIIYRILNHNHSKAISIDPIAKHFPDQDYGQNRQKVKEFMKYQRDGPEKGLWRLKDDEKLLDNEAVKSLITPEQISQVESMSQGLQFQEDNEAYNFDSKLKSLEENLLPWNITKNFINSTQMRAMIQIHGVGDPTGCGEGFSFLKTSMKGGFVKSGSPSSNNNSSNKKGTNTHSYNVAQQQKAYDEEIAKTWYTHTKSLSISNPFEEMTNPDEINQTNKHVKTDRDDKKILKIVRKKRDENGIIQRQTIFIRDPRVIQGYIKIKEQDKEDVNKLLEEDTSKINNLEELEKQKKLLQLELANLEKSQQRRAARQNSKRNGGATRTENSVDNGSDLAGVTDGKAARNKGKNTTRRCATCGQIGHIRTNKSCPMYSSKDNPASPK

SEQ ID NO: 131 - DNA, 2085 bp, Saccharomyces cerevisiae
atgcttttcgctagattagtgctgctgttggtgtatttggcaccaggttctttagcaaaaccagcatcaactaagaaaagaacgcaatgggaccagatagcaattgatgcttgtgctaaagaattggaatcacacaaatttgacacggatgtgaagggtcggcacgctactctttgcacttatgaaccagcactagggtcttggttacattgcgcgaaggatgttctcgacagtaggaagaaaagtaaaaaaatattcgaaaaaacgtttagcaaaattaatcagtattgccacgattatcacaaagatgaggtcgtcagcaatgaggagtattatcgaatttttgccaatgcatcccttttcatccggcctcttgatgaggtaaaggaaaacatacgatatcccgtcactcccaataaagcctctctagataggtgggtatgggcttattttgggcccctggataatatagacaaaggaaatgtttatggagtgacgatttgcttatactggataggagttctgtttattgcagctgtatatcacttcttgaacttttctcgacttaaacaaacggtgttcaaaaacaaggtgtctgctttcttaagaggccactatgttcttccagcgcttgttcataaccatgctatgtcagtgggaaggtggtttttcatcggtctggtccctaccaggttagagacccttgtcctattcggttacgttttgttgcacgggttcttgttgagtagttacaattttgaccataatgagttgctcagtgatcgcagaagccaagtgcttatcttcctttccgacagggcagggatcctggcattcgcacattttcctttgatagttctctttggcggtaaaaacagcacaatgacttggctcacaggtataagatataccgcattcattacttaccacaaatggttaggaagattcatgttagtagactgtacgatccatgcaataggatacacctaccatgcatacatagaaaattactggaaatacgtgaagtatagtgatctatggacatccggaagacatgccatgatcattgttggaatacttgtgtttttttcgttcttcttctttagacgacattattacgaattgtttgttattacgcacattatcttagcaataggatttttccatgcgtgctggaaacattgctataaacttggatggggtgaatggataatggcgtgtgcactgttttggattgctgaccgtattctgcggctaataaagattgcaatttttggaatgccatgggctaaattgaaactgtgtggcgagtccatgatagaagtgagaatctcaaaaagctccaaatggtggaaagcagaacctggccaatatatatatctgtacttcttaagaccaaaaatattctggcaatcacatccattcacggtcatggattctttggttgaggatggtgagttggtagttgtgataacagtgaaaaatgggctaaccaaaaaattacaggaataccttttagagagcgaagggtacacggaaatgcgagtactagcagaaggaccttatggacaaagcacgcgaacacatttgttcgaaagcctcctgtttattgccggaggggcgggtgttcctggacctctgtcgatggcaataaaggcaggtcgccaggtcaaaagcaacgattctcatcaaatgatcaaatttgtgtggagtgtacgtaaccttgatctcttagaagtgtatcgcaaagagataatggtgctaaaagagttgaacatagacacaaaaatttacttcacaggagagcgaaaagatgaatcgaacacggaggagggagcaattgctaatatgagcacggaaggcagactgctgacgacatcgaaatcagcggaaatgattactgattttggacgaccaaatatcgatgagataattgaagaagcagtaagtggtgcaaaatctttgttggtcacttgttgcgggtcagagggctttgtagacaagacacgagagttgacggcaaaaagagttcttgaacacggtgacaaatggatagaatacgtggaggaattccagaattggtag

SEQ ID NO: 132 - protein, 694 aa, Saccharomyces cerevisiae
MLFARLVLLLVYLAPGSLAKPASTKKRTQWDQIAIDACAKELESHKFDTDVKGRHATLCTYEPALGSWLHCAKDVLDSRKKSKKIFEKTFSKINQYCHDYHKDEVVSNEEYYRIFANASLFIRPLDEVKENIRYPVTPNKASLDRWVWAYFGPLDNIDKGNVYGVTICLYWIGVLFIAAVYHFLNFSRLKQTVFKNKVSAFLRGHYVLPALVHNHAMSVGRWFFIGLVPTRLETLVLFGYVLLHGFLLSSYNFDHNELLSDRRSQVLIFLSDRAGILAFAHFPLIVLFGGKNSTMTWLTGIRYTAFITYHKWLGRFMLVDCTIHAIGYTYHAYIENYWKYVKYSDLWTSGRHAMIIVGILVFFSFFFFRRHYYELFVITHIILAIGFFHACWKHCYKLGWGEWIMACALFWIADRILRLIKIAIFGMPWAKLKLCGESMIEVRISKSSKWWKAEPGQYIYLYFLRPKIFWQSHPFTVMDSLVEDGELVVVITVKNGLTKKLQEYLLESEGYTEMRVLAEGPYGQSTRTHLFESLLFIAGGAGVPGPLSMAIKAGRQVKSNDSHQMIKFVWSVRNLDLLEVYRKEIMVLKELNIDTKIYFTGERKDESNTEEGAIANMSTEGRLLTTSKSAEMITDFGRPNIDEIIEEAVSGAKSLLVTCCGSEGFVDKTRELTAKRVLEHGDKWIEYVEEFQNW

SEQ ID NO: 133 - DNA, 2139 bp, Saccharomyces cerevisiae
atgcatagaacgcttctgtttttaacgtggctgatatctttaacaaaggcttttaatataaaattaccacacactgaaaaaaaagaccatttggaatccaacgctgtgctggcatgcgcatcctatataaatactctgaagtggtcatttgatagctccgtcgtaccgggtttctattctaccatatgctcttattcaccagcgtttgatacttggtcactttgtatcttcaattcgcttacagaccagattattcccatggacaacacaagtttcgaagaaagcttgggtaacgtacgaaaaacgtgctcgtttgtcgataaaaagtttagcaatatttcactggagcaatactactcatctttaaataatgcttcttctcacgctttggaagactatggttctattgaaagtttatcgacatccattcgagtcgatcgtgagacaagatctagatggatacgagcttttcatgcgcatgcctataatttagatatcagcagtgtttatggtgcatatttaacttactacttcgtcatagtgggtattatcgccgtcttcttccatatgagtcactataacggcctgaatcgagcgctatttgcaagccggttcgtcaattatattcggggccattttgtgttgcctacgtttttagtagataagcacgctaatcacttcaagtttctaaacgtggaagtctttacgggactgatgccgaattccttggaggcatggatcatttttggatacacattggcgaacatcatatttttgtccataagttacatcatagacccatataacctcattttcaacagtcacctgtcgcagtttacaagactgttggctgatagatctgggatactggcgtttactcagttccctctcattatcatttttacggcaaggaatagttttctcgaatttttaacaggagtcaagttcaattcctttattagtttccataaatggatcggtagaatcatggtcttaaacgcaacgatacattcgctttcttattcattattcgcaattatcaaccatgccttcaaaataagcaacaaacagctctattggaagtttggtattgcatccataacagtgctttgcgttctactagttctatcgctcggaatagtaaggaaaagacattacgaatttttcctgtacacccacatcatactagcccttttgttcttttactgttgttggcaacacgtcaaaattttcaacggttggaaagaatggatagtggtatccttgctcatttgggggctggaaaagcttttcagaatatggaacattttgcagtttagatttccgaaagcaacactaatcaatttgaacaccagcaacaacccgcacgatgaaatgtttaaagtaatcatacccaaatataaccggagatggcattcgaaaccgggtcaatattgtttcatttattttttacatccattggtattttggcaatgccatccatttaccattatcgacgaaggtgagaagtgtgttttagtgatcaaacctaaaagtggtctcactagattcatttataaccatattttgcaatctttaaatggtaaattacaactccgagtggccattgagggaccttatgggcccagtaatcttcacctcgataaattcgaccatttgctgttactaagtggaggaacaggcttgcctggtccattagatcatgccattaagctgtcacgaaaccctgataaacccaagagtatagatttgatcatggcgatcaaaaatccttcttttcttaacggctataaatccgagatactagagctaaaaaatagccgatcccacgtcaacgtgcaggtttaccttacacagaaaacagctgttacaaaggcagcaaacgcacgagaccaattaatacattttgatgatataatgaccgaactgacaagcttcgcccacatcggcaatgcaagacctaattttagcaatgtaattgaaaacgcaataaaaagtacgccgcctggagattcattagcggtcgtgtgctgcggccctcctgttctggtggacgatgttagaaacaccgtttctcaaaaactcctcggttacccagagagaattatagagtatttcgaggaatatcagtgttggtaa

SEQ ID NO: 134 - protein, 712 aa, Saccharomyces cerevisiae
MHRTLLFLTWLISLTKAFNIKLPHTEKKDHLESNAVLACASYINTLKWSFDSSVVPGFYSTICSYSPAFDTWSLCIFNSLTDQIIPMDNTSFEESLGNVRKTCSFVDKKFSNISLEQYYSSLNNASSHALEDYGSIESLSTSIRVDRETRSRWIRAFHAHAYNLDISSVYGAYLTYYFVIVGIIAVFFHMSHYNGLNRALFASRFVNYIRGHFVLPTFLVDKHANHFKFLNVEVFTGLMPNSLEAWIIFGYTLANIIFLSISYIIDPYNLIFNSHLSQFTRLLADRSGILAFTQFPLIIIFTARNSFLEFLTGVKFNSFISFHKWIGRIMVLNATIHSLSYSLFAIINHAFKISNKQLYWKFGIASITVLCVLLVLSLGIVRKRHYEFFLYTHIILALLFFYCCWQHVKIFNGWKEWIVVSLLIWGLEKLFRIWNILQFRFPKATLINLNTSNNPHDEMFKVIIPKYNRRWHSKPGQYCFIYFLHPLVFWQCHPFTIIDEGEKCVLVIKPKSGLTRFIYNHILQSLNGKLQLRVAIEGPYGPSNLHLDKFDHLLLLSGGTGLPGPLDHAIKLSRNPDKPKSIDLIMAIKNPSFLNGYKSEILELKNSRSHVNVQVYLTQKTAVTKAANARDQLIHFDDIMTELTSFAHIGNARPNFSNVIENAIKSTPPGDSLAVVCCGPPVLVDDVRNTVSQKLLGYPERIIEYFEEYQCW

SEQ ID NO: 135 - DNA, 2136 bp, Saccharomyces cerevisiae
atgtattgggtcctcctttgtggttctattttgttatgctgcttgtcaggagcaagcgcctcccctgctaagacaaaaatgtacggcaagttaccactggttttgacagatgcctgcatgggagttctcggcgaagtaacctgggagtatagtagtgacgatttatattcctcaccagcatgtacatatgaaccggcattacagtcaatgttgtattgtatttacgaatcattgaatgaaaagggttattccaatagaacctttgaaaaaacctttgctgctatcaaagaagactgcgcatattacactgataaccttcagaatatgactaatgcagatttctataatatgctgaataatggaacaacatacataatacagtattctgaaggtagcgcgaatcttacgtatccaatcgagatggatgcccaagtgagagaaaactattattattcttaccatggtttctacgccaactacgacattggtcatacttatggtggtattatttgcgcctattttgtaggtgttatgattcttgccagcatactccattatctaagttacactccgtttaaaactgccttatttaaacaaagacttgtaagatatgtgagaagatatttgacaatacctactatctggggtaaacatgcgtcgagcttttcttaccttaaaatttttacaggcttccttcccacacgatctgaaggcgtcattatacttggatacctcgtgcttcatacagtttttctggcatacgggtatcaatatgatccttacaacttaattttcgactctcgtagagaacagattgctcgatacgtggcagatagaagtggtgtcctggcatttgcacattttcccctaatagctcttttcgcaggaaggaacaattttctagaattcatttctggagtaaaatatacctctttcataatgtttcataagtggttgggaagaatgatgtttttagatgctgtgattcatggcgctgcttataccagttattccgtattctacaaagattgggcagcaagcaaggaagagacatattggcaatttggagtagctgctctttgtatagttggtgttatggtgtttttttctttggcaatgttcagaaagtttttctatgaagccttcttatttctccatattgtgcttggcgcattgttcttttatacgtgttgggagcacgtcgtagaattgagtgggattgagtggatatacgctgctattgctatctggactattgataggctaattcgaattgttagagtatcttatttcggtttccctaaggcttccttacagttagttggcgatgacatcattcgagtcacagtcaaacgaccagtaaggctatggaaagccaaaccaggacagtatgttttcgtttcattcctacaccacctgtatttttggcagtcacatcctttcacagtcttagattcaattatcaaagatggtgagctgactattatcctgaaggaaaaaaagggagtaacaaaacttgtcaaaaagtatgtgtgttgcaatggaggtaaggcatctatgagactagctatagaaggtccatatggctcttcatctccagtcaataattatgataacgtcttgctacttacgggaggtactggtttgccagggcccattgcacacgccattaaacttggaaaaacgtcagcggcaactggaaaacaattcataaaattagtgattgcagttagagggtttaacgtactcgaggcttacaagccggagctgatgtgtctagaagatcttaatgtacagcttcacatctacaatacaatggaagttccggcattaactcctaatgatagtttggaaatttctcaacaagacgagaaggccgatggaaaaggtgttgttatggcaactaccctagaacagtcacctaatccagttgaatttgatggtactgtttttcatcatggaagacccaatgttgaaaagcttctgcatgaagttggtgacctaaatggatcgttagctgtggtttgttgtgggcctcctgttttcgttgacgaagtaagggatcaaacggcaaatcttgttctagagaagcctgcaaaggcaatcgaatactttgaagaataccaaagttggtaa

SEQ ID NO: 136 - protein, 711 aa, Saccharomyces cerevisiae
MYWVLLCGSILLCCLSGASASPAKTKMYGKLPLVLTDACMGVLGEVTWEYSSDDLYSSPACTYEPALQSMLYCIYESLNEKGYSNRTFEKTFAAIKEDCAYYTDNLQNMTNADFYNMLNNGTTYIIQYSEGSANLTYPIEMDAQVRENYYYSYHGFYANYDIGHTYGGIICAYFVGVMILASILHYLSYTPFKTALFKQRLVRYVRRYLTIPTIWGKHASSFSYLKIFTGFLPTRSEGVIILGYLVLHTVFLAYGYQYDPYNLIFDSRREQIARYVADRSGVLAFAHFPLIALFAGRNNFLEFISGVKYTSFIMFHKWLGRMMFLDAVIHGAAYTSYSVFYKDWAASKEETYWQFGVAALCIVGVMVFFSLAMFRKFFYEAFLFLHIVLGALFFYTCWEHVVELSGIEWIYAAIAIWTIDRLIRIVRVSYFGFPKASLQLVGDDIIRVTVKRPVRLWKAKPGQYVFVSFLHHLYFWQSHPFTVLDSIIKDGELTIILKEKKGVTKLVKKYVCCNGGKASMRLAIEGPYGSSSPVNNYDNVLLLTGGTGLPGPIAHAIKLGKTSAATGKQFIKLVIAVRGFNVLEAYKPELMCLEDLNVQLHIYNTMEVPALTPNDSLEISQQDEKADGKGVVMATTLEQSPNPVEFDGTVFHHGRPNVEKLLHEVGDLNGSLAVVCCGPPVFVDEVRDQTANLVLEKPAKAIEYFEEYQSW

SEQ ID NO: 137 - DNA, 1362 bp, Saccharomyces cerevisiae
atgaacaacacttccataaccggaccacaagtactacatagaacaaaaatgagaccactaccagtgctagaaaaatactgtatctcgccacatcatgggtttttggacgaccggttacccttgaccagactgagcagcaagaaatatatgaaatgggaagaaatcgttgctgacctgccctctcttttgcaagaggataacaaggtgcggagcgtcatcgatgggctggatgtcttggacttggatgagacgatcttgggcgacgtcagggagctcagaagagcatattccattttggggtttatggcgcacgcttatatttgggccagcggaactccccgggatgtattaccggagtgtattgcaaggccactgttggagacagcacatattttgggtgtgccaccgttagctacgtactcctcgttggtgttatggaacttcaaagtgaccgacgagtgcaagaaaacggaaaccgggtgtttggacttggaaaatattacaacgataaacacatttacgggaaccgttgacgaaagttggttttatctggtcagcgtgcggtttgaaaaaatcggcagcgcttgtttaaaccatgggttgcagatattgagagccattagaagcggtgataaaggagacgctaacgtgatagacgggttggagggcttggctgcaacgatcgaaaggttatcgaaagccttgatggaaatggagcttaagtgtgaacccaatgtattttatttcaagataagaccatttttggccgggtggacgaatatgtcgcatatggggttaccacagggtgttaggtatggagcggaaggacagtatcggatcttttctggcgggtccaatgcgcaaagctcgttgatacagacactggacatccttttgggtgtgaaacacactgcgaatgctgcgcattcttcccaaggagacagcaagatcaattatctggacgaaatgaaaaaatacatgccaagagaacatcgtgaatttctttaccatttggaatcggtatgtaatattcgcgaatacgtttctcgtaacgcttctaaccgtgcattgcaagaggcctatggacgttgcatttccatgctgaaaatatttagagataaccacattcaaattgttaccaagtacattattttgccctccaattcaaagcaacacggctccaataagccgaacgtactaagtccaatcgagcccaataccaaagcaagtggttgtttagggcataaagttgcctcatctaagactatcggaaccggtggtacaagattaatgcccttcttaaagcagtgcagggacgagactgtcgccactgcggacattaaaaatgaagataaaaattga

SEQ ID NO: 138 - protein, 453 aa, Saccharomyces cerevisiae
MNNTSITGPQVLHRTKMRPLPVLEKYCISPHHGFLDDRLPLTRLSSKKYMKWEEIVADLPSLLQEDNKVRSVIDGLDVLDLDETILGDVRELRRAYSILGFMAHAYIWASGTPRDVLPECIARPLLETAHILGVPPLATYSSLVLWNFKVTDECKKTETGCLDLENITTINTFTGTVDESWFYLVSVRFEKIGSACLNHGLQILRAIRSGDKGDANVIDGLEGLAATIERLSKALMEMELKCEPNVFYFKIRPFLAGWTNMSHMGLPQGVRYGAEGQYRIFSGGSNAQSSLIQTLDILLGVKHTANAAHSSQGDSKINYLDEMKKYMPREHREFLYHLESVCNIREYVSRNASNRALQEAYGRCISMLKIFRDNHIQIVTKYIILPSNSKQHGSNKPNVLSPIEPNTKASGCLGHKVASSKTIGTGGTRLMPFLKQCRDETVATADIKNEDKN

SEQ ID NO: 139 - DNA, 1113 bp, Saccharomyces cerevisiae
atgtcgaaacagtgggcgagtggtacaaacggagctttcaaaagacaggtttcgtccttcagagaaacaatctctaagcaacacccaatttataagccagcaaagggaagatattggttgtatgtttcacttgcatgcccatgggcccatagaacactaattacgagggctttgaagggattaacctctgttataggatgtagcgtagtccattggcaccttgacgagaaaggatggagatttttggacatggaaaagcaattggaggacagtgaagattttttggaacattggcacgatgttgcaggtggtattagaactgctaaagaggattccagcaagagcttcgccgagatcaagaatgacagtcaaagattcatggttgatgctaccaatgagcctcactatggatacaagagaatcagtgacttatattacaagagcgatcctcaatactcggcaaggttcaccgtcccagtcctgtgggacttagaaacccaaacaattgttaacaacgaaagtagcgaaattataaggattttgaactctagtgcgttcgatgaatttgtcgacgacgatcacaagaaaacggaccttgttcctgctcagttgaaaacacagatcgatgacttcaattcttgggtttacgacagcatcaacaatggtgtatacaagaccggattcgcagagaaagcagaagtttacgaaagtgaagtcaacaacgtatttgaacatttggacaaagtggagaaaatcctgagtgacaaatattccaaattgaaggccaaatacggtgaagaagatagacaaaaaatcttgggtgagttcttcactgtgggtgatcaattaacagaagctgacattagattgtatactaccgtcataagattcgatcctgtgtacgtccaacatttcaaatgcaattttacctctattagagccggatatccatttattcatttgtgggtaagaaatttatactggaattatgatgccttcaggtacacaacagattttgaccatatcaagttacactacacgcgttcccacacaaggatcaaccccttgggaattacgcccctgggacccaagccagatattcgtcctttataa

SEQ ID NO: 140 - protein, 370 aa, Saccharomyces cerevisiae
MSKQWASGTNGAFKRQVSSFRETISKQHPIYKPAKGRYWLYVSLACPWAHRTLITRALKGLTSVIGCSVVHWHLDEKGWRFLDMEKQLEDSEDFLEHWHDVAGGIRTAKEDSSKSFAEIKNDSQRFMVDATNEPHYGYKRISDLYYKSDPQYSARFTVPVLWDLETQTIVNNESSEIIRILNSSAFDEFVDDDHKKTDLVPAQLKTQIDDFNSWVYDSINNGVYKTGFAEKAEVYESEVNNVFEHLDKVEKILSDKYSKLKAKYGEEDRQKILGEFFTVGDQLTEADIRLYTTVIRFDPVYVQHFKCNFTSIRAGYPFIHLWVRNLYWNYDAFRYTTDFDHIKLHYTRSHTRINPLGITPLGPKPDIRPL

SEQ ID NO: 141 - DNA, 645 bp, Saccharomyces cerevisiae
atgtcatttaacagtccattttttgatttctttgacaacatcaacaacgaagttgatgcctttaacagattgctgggtgaaggcggcttaagaggctacgcaccaagacgtcagttagcaaacacacccgcaaaggattctactggcaaggaagttgctagaccaaataactatgctggcgctctttatgatcccagagatgaaaccttagatgattggttcgacaatgacttgtccctgttcccatctggtttcggtttccctagaagtgtcgcagttccagttgatattttggaccatgacaacaactacgagttgaaagtcgtggttcctggtgtcaaaagcaagaaggacattgatattgagtaccatcaaaacaagaaccaaattttggtttctggtgaaattccatctaccttgaatgaagagagtaaagacaaggtcaaggtcaaggagagcagctctggtaagttcaagagagtcatcactttgccagactacccaggtgtggatgcagacaacattaaagcagactacgcaaatggtgttttgacattaacagttccaaaattgaagcctcagaaggatggtaagaaccacgtcaagaagattgaggtttcttctcaagaatcgtggggtaactaa

SEQ ID NO: 142 - protein, 214 aa, Saccharomyces cerevisiae
MSFNSPFFDFFDNINNEVDAFNRLLGEGGLRGYAPRRQLANTPAKDSTGKEVARPNNYAGALYDPRDETLDDWFDNDLSLFPSGFGFPRSVAVPVDILDHDNNYELKVVVPGVKSKKDIDIEYHQNKNQILVSGEIPSTLNEESKDKVKVKESSSGKFKRVITLPDYPGVDADNIKADYANGVLTLTVPKLKPQKDGKNHVKKIEVSSQESWGN

SEQ ID NO: 143 - DNA, 1230 bp, Saccharomyces cerevisiae
atgggcaatatccttcggaaaggtcagcaaatatatttagcaggtgacatgaagaagcaaatgttgctaaataaagatggaacacctaagaggaaggtgggcagaccaggcagaaaaaggattgactctgaagctaagagtaggaggactgcccagaatagggcagctcaacgagcgttccgagataggaaagaagccaaaatgaagagtttgcaagagagggtagagttactagaacagaaagatgcgcagaataagactaccacggactttttactatgttctttaaaaagtttactgtcggaaattacaaaatatagagctaagaattctgatgatgaaagaatattagccttcctcgatgatctgcaagaacaacagaaaagggaaaacgaaaaaggaacaagtacagcagttagcaaggctgcaaaggaattgccatcgcctaattcagatgaaaacatgactgtgaacacaagtatagaagtacagccgcacactcaagagaatgagaaagttatgtggaacataggctcatggaacgctcccagtttaaccaattcgtgggattctccccccggaaatcgaacaggtgccgttaccatcggtgacgaaagtattaatggtagtgaaatgccagatttcagtctcgatcttgtctccaatgatagacagactggtctagaagctttagattacgacattcataactactttcctcagcactctgaacgcctgaccgctgaaaaaatagatacgtcagcatgtcaatgtgaaattgaccaaaagtatcttccatacgagacagaagatgatactttattccccagcgtgcttccccttgctgtagggagccagtgtaataatatttgcaaccgcaagtgtatcgggaccaaaccatgttcaaataaggagatcaaatgcgacttaataacaagccacctgttgaatcagaaatctctagcttcggtgcttccggtggctgcttctcatactaaaacaattcgaacccaatctgaagcaattgaacacattagcagcgccatatcgaatggaaaagcgtcttgctaccacattctcgaagagatctcctccctaccaaaatattcatcgttggacatagatgatttatgcagcgaattaataatcaaggcaaaatgtacagatgactgcaaaatagtagtcaaagctcgcgacttacagagtgctctggttagacagctcctgtag

SEQ ID NO: 144 - protein, 409 aa, Saccharomyces cerevisiae
MGNILRKGQQIYLAGDMKKQMLLNKDGTPKRKVGRPGRKRIDSEAKSRRTAQNRAAQRAFRDRKEAKMKSLQERVELLEQKDAQNKTTTDFLLCSLKSLLSEITKYRAKNSDDERILAFLDDLQEQQKRENEKGTSTAVSKAAKELPSPNSDENMTVNTSIEVQPHTQENEKVMWNIGSWNAPSLTNSWDSPPGNRTGAVTIGDESINGSEMPDFSLDLVSNDRQTGLEALDYDIHNYFPQHSERLTAEKIDTSACQCEIDQKYLPYETEDDTLFPSVLPLAVGSQCNNICNRKCIGTKPCSNKEIKCDLITSHLLNQKSLASVLPVAASHTKTIRTQSEAIEHISSAISNGKASCYHILEEISSLPKYSSLDIDDLCSELIIKAKCTDDCKIVVKARDLQSALVRQLL

SEQ ID NO: 145 - DNA, 1545 bp, Saccharomyces cerevisiae
atggaggaacaacgtgaaatactggaacaattgaagaaaactctgcagatgctaactgtagagccatctaaaaataaccaaatcgccaacgaagaaaaggaaaagaaagaaaatgaaaattcgtggtgcatcctcgagcacaattatgaggatattgcacaggaattcattgatttcatttacaagaaccctaccacttaccatgtagtatcatttttcgcggagctgttagataagcataacttcaaatacttgagcgagaaatccaattggcaggactccattggcgaagatggtgggaaattctacactataagaaatggaactaacctatctgcctttatcctgggcaaaaactggagagccgaaaagggtgtcggtgtcattggatctcatgtggacgctttgacggtcaaattgaagcccgtctcctttaaagacacagcggaaggttacggaagaattgctgttgctccctatggaggtacactgaatgaattgtggctagacagagacctaggtattggtggtcgccttctttacaagaagaagggcactaacgaaattaaaagcgccttggttgattctacacccctacctgtttgtcgaattccttccttggctccccatttcggtaaacctgctgaaggcccatttgataaagaggaccaaactatcccggtcatcggcttccccactccggatgaggaaggtaatgaacctcccacggatgatgaaaagaaatcgcccttatttggcaaacactgcatccacctgttaaggtacgttgccaaattagccggtgtggaagtgtccgaattgattcaaatggatttagacttattcgatgtgcaaaagggtaccattggaggtattggtaaacacttcctttttgcaccacgtctagatgacaggttgtgtagtttcgcagcaatgattgctttgatttgctacgctaaggatgttaataccgaggaatcagatttattctctactgtcactttgtatgataatgaagaaatcggatcgttgacaagacaaggcgcaaaaggtggcttgttggagtcagtggtggaacgcagttcttctgcattcactaagaaaccggtcgatttgcatacggtttgggctaattccatcatcttgtccgcagacgtcaaccacctctacaacccaaactttcctgaagtctatttgaagaatcattttccagtgcctaatgtcggaatcactttatcactggatcctaacggtcatatggccacagatgtcgtaggaactgccctagtagaagaattagcacgccgcaatggagacaaagtgcaatatttccaaatcaaaaacaactcaagatcaggtggtactatcggcccatcattggcttctcaaacaggtgctcgtaccatagacctgggaattgcacagttgtccatgcacagcatcagagctgctacagggtccaaggatgtcggattaggtgttaagttcttcaacggatttttcaagcactggagatcagtctacgatgaattcggcgagttgtga

SEQ ID NO: 146 - protein, 514 aa, Saccharomyces cerevisiae
MEEQREILEQLKKTLQMLTVEPSKNNQIANEEKEKKENENSWCILEHNYEDIAQEFIDFIYKNPTTYHVVSFFAELLDKHNFKYLSEKSNWQDSIGEDGGKFYTIRNGTNLSAFILGKNWRAEKGVGVIGSHVDALTVKLKPVSFKDTAEGYGRIAVAPYGGTLNELWLDRDLGIGGRLLYKKKGTNEIKSALVDSTPLPVCRIPSLAPHFGKPAEGPFDKEDQTIPVIGFPTPDEEGNEPPTDDEKKSPLFGKHCIHLLRYVAKLAGVEVSELIQMDLDLFDVQKGTIGGIGKHFLFAPRLDDRLCSFAAMIALICYAKDVNTEESDLFSTVTLYDNEEIGSLTRQGAKGGLLESVVERSSSAFTKKPVDLHTVWANSIILSADVNHLYNPNFPEVYLKNHFPVPNVGITLSLDPNGHMATDVVGTALVEELARRNGDKVQYFQIKNNSRSGGTIGPSLASQTGARTIDLGIAQLSMHSIRAATGSKDVGLGVKFFNGFFKHWRSVYDEFGEL

SEQ ID NO: 147 - DNA, 636 bp, Saccharomyces cerevisiae
atgagcaccgcattcaacgattactgcactgtttgtgatcgtctcattccaacatctccacagaaaacgaacattaataccaggaagatccaaagggacaatgaaaccaagagcagtttacaatcaaataagttatattgctccgaagattgtaagctgaaggattcgaaccctcttaatgagaaattattatcccacttgcataaaaaatcaaaaacttctcattcgcataatctcactccaccgctttcatattctaaaaatttaactgcatcaaacctcttcgagccgactacctcactatcttcatctccgacatcttcaactatcccctttgacgagttggagaagctagagtccttattaatttcaccattgctgctacctcaggatggtatagtcaatcctaagcaggagtctaatccttctcgtgttgacgaatatgatgaaaatgaacattatttgaacttagccgactctcttagactcgattctagttaccaattgcattcaaaggcacatttgggttacgaaaacaacttgccacgatcaaacgatctaattgatgatcatttgatctcagatcagatcattgagaataactacaacctatggtttagactatcctccagttaa

SEQ ID NO: 148 - protein, 211 aa, Saccharomyces cerevisiae
MSTAFNDYCTVCDRLIPTSPQKTNINTRKIQRDNETKSSLQSNKLYCSEDCKLKDSNPLNEKLLSHLHKKSKTSHSHNLTPPLSYSKNLTASNLFEPTTSLSSSPTSSTIPFDELEKLESLLISPLLLPQDGIVNPKQESNPSRVDEYDENEHYLNLADSLRLDSSYQLHSKAHLGYENNLPRSNDLIDDHLISDQIIENNYNLWFRLSSS

SEQ ID NO: 149 - DNA, 837 bp, Saccharomyces cerevisiae
atgagagcaccaccttcaccgagaaagtccaaatctggtcattttttttacctatattttcgactgtgtcaactgttcagtggccggaaattaaagaggaggtggcatgtccacaaacttcacattcaccaatataatactcgctggaacttgagccccctctccgaaatacacattgaggacatgataaatgaaccgtctggactatgtccaggaagttccaaaaagaaaccactactgattgcaaggtttcccaagggttgccaagaatcaccaagggtatatgtactgcaaaggaacaatttgtctcgtttaaaattaagcaaaagaaaatatgccctaaggttctatcacaatgaaatttttggcaataatttaaagagaaaagacggaagcatccacaaagttgaacaccaacagtgcgcagaaaccgttagaaagatcaagaaagtcacagcaaaccatgctgatgttaaaataatatttcacgataaaaatactataagaagtgacaaattagggggtaggagtaataagatgcagactaggcctagtgttcttgaagaggatgtagaagaagaagtctcttcggtatatatcagattttgtgacgaccattccctgagagttaaagattatcactctttgcacaggcattctaaaaaatcttctaaagaaaaacgaaataatcaggagattggaaaatctaagttgcttgggaagctttttgaagaggaaacatcgcgtcaaaacaaaggtgtagagaagaaactagatacgattgtgatacagaaatttcaaaattatcctattgtctccttctctcgtgtcatttaa

SEQ ID NO: 150 - protein, 278 aa, Saccharomyces cerevisiae
MRAPPSPRKSKSGHFFYLYFRLCQLFSGRKLKRRWHVHKLHIHQYNTRWNLSPLSEIHIEDMINEPSGLCPGSSKKKPLLIARFPKGCQESPRVYVLQRNNLSRLKLSKRKYALRFYHNEIFGNNLKRKDGSIHKVEHQQCAETVRKIKKVTANHADVKIIFHDKNTIRSDKLGGRSNKMQTRPSVLEEDVEEEVSSVYIRFCDDHSLRVKDYHSLHRHSKKSSKEKRNNQEIGKSKLLGKLFEEETSRQNKGVEKKLDTIVIQKFQNYPIVSFSRVI

SEQ ID NO: 151 - DNA, 3657 bp, Saccharomyces cerevisiae
atgataaaaaatggtacatgcccctattgggaacgtgatgatctttcggaatgtgctaggcgagaatatatcgagtttaaatttcctctatttatattgttgactggtatgatatacgcgttttgcaaagtctttcgagccttttatctaagggggaaaaatcatacaaatgaagcgccagaatttgaagaacaaggtaatggaaaccacgaatatgcaaggttctcagttttaagactaaaatctgcatgggaaagccgtagcttttgtaatgttaataatagatctactttcgacaaattcaaaaaatttatagagggtgccttcattgttttgcagcttactatccacctgtatattttatctagtatgccaatggataacaaaaagttctttcaccaaggttttctggttcaaatgtttctctggattttactgcttgttgttattacacttcgtttaatttcagcaagccagtcatttcggtgggttttagcatgtaagcgtgatttatgggctgtttcgttttactcatatgcatccctgtttactctttcgattttacctcttcgttccgtcttcattggaaagataaaagataaaattatggtcaaatatatcatttccgagactttcattgatttagcgcttttattattattatcaacgtcaagtatagaaggaactaggtactcatttttggttgaaaatgagaacaaaaagttgccaccggctcctaccgtctttggccttcttactttttctaggattgatcggcttatttggaaagcatacaaacactgccttggaaacgctgatatttgggatttggatattaataataagtctatagcaattttggcgaactttgaaatgtcttctaaaaaaggaaggctccttccaaacattatttgttattttaaggctgttttcatctcccaattatttctggcttttgtatctagttttttgaactttgtaccctcattgttgatgccaagaatactatcatacgttaatgacccaaagtcaaaatcatggaacttggtgtctttatacgtctcatctatgctcgtcagtaaaatcattgccacgacttgtagaggtcaaggattgtttttaggtgaaaagggtactatgcaactaagaacagttttgatatccaatatctattccaaaaccttaagaagaacaattctaaaagactcaacaacgtcacttcaaaaaaatgcgtcaacatcctttgaagaaaatcctgactcttctgaagcggaacctagaaaaaagtctagtaggaaagacaactctgtgaacaatgttatgtcaattgacgctttcaaggtttctgaagctatgaacactttttatctggcatgtgaagcagttttcatgacagttacggccctaatgatactatattccctactgggatggtccgcctttgctggtacctttgctcttcttgccatgattcctttgaatttttggtgtgcaactttttacgggaactatcaggccgatcaattaatcctaactgacaagcgtacctctgggattagtgaggctctgaactcaatacgtgtaataaagctactggcatgggaaaatctgttttatcaaaagattataaacgtaagagatggggaaataagactccttaaaaagaaggcaacaattttctttttgaaccatctcatttggttctttgggcccactttggtctctgcaataacattctcagtgtttattaaattccaaaatcagacacttactcctacaatagcatttacagctctttctttatttgcaatattgaggacacccatggaccaaattgcttcgactgtcagccttttgatacagtcttttatttctcttgaaagaatccaggattatcttaatgaatcagaaacaagaaaatatgagattttggaacaaagcaatactaaatttggctttgaagatgcaagcatggaatgggaagctgctgaaacaagttttaaacttaagaacatttctattgattttaagctgaatagtctcaacgcaattataggtccgactgggtcaggaaagtcttcgctattacttggactattgggagaattgaaccttctttctggaaaaatatacgtacctacagttgaatcccgcgacgacttagagattggtaaagacggaatgacgaattcaatggcatattgttctcaaactccgtggttgattagtggaacaattaaagataacgttgtttttggagaaatcttcaacaaacaaaaatttgatgatgtaatgaaatcctgttgtcttgacaaagatatcaaagcaatgacagctggcataagaacagacgtgggtgatggaggattttccttatctggcggacagcagcaaaggattgctttagccagagcaatttactcctcttccaggtatttgatccttgatgattgcttgagtgcagtagatcctgaaactgcactttatatatatgaagagtgtttatgcggccccatgatgaaaggaaggacctgcatcattacgagtcataatatttctttagttacgaaacgggctgactggcttgtgattttagatcgtggcgaggtgaaatcacagggtaaaccatcggacctcattaaatctaatgagtttttgagggaaagcataaacaatgattcaaaaaatacaactcacaatcaaattgacttgaaaagatcaacaacatcaaagaaaactaagaatggagatcccgagggagggaactcgcaagacgaagtgtgtgctgaagttgaaaattttgaggaaacaaaaatggaaggatcagttaaattttcagcttacaaatggttagcagactatttcgggggactgggagttgtttttgttttcacctcgtcctccatccttattcatggaatcacactgtctcagggcttttggctcagatactggctggacactggatcttcagggagtaagtctacctggctttatagaatagttgagggtcactctaacatctatttcttactgacttatattatcataggtcttgtttcttcatttttaacttctggtaaagtttggatagcaataatttcaggtaccaacgtcaccaagaaaatatttgcgaagcttctatccagtatcttatatgccaagttacgttttcataatgtcacgccgactggaagaataatgaacagatttagcaaggatatggatattattgatcaacaattgatccctaatttcgaaggactctcttatagcgtcgttgtttgtctgtggattatacttttaattggatatgttactcctcaatttctgttatttgctattcctttatgcgctctttattataccgtatgtacgttatatcttcgtgcatctagagagttgaagagaatagataacatcaatatctctccaatacaccagttattcgctgaagccatcaaaggagtaactacaattagagcattagcagatgagcgtaggtttatcactcaatctttggttgcaattgacagaagtaatgctccatttttttatctcaatatggccaccgagtggatcacatatagagtggatataattgggacacttgttctttttagttcttctgtaatgatcataatgaaggcctcatag

SEQ ID NO: 152 - protein, 1218 aa, Saccharomyces cerevisiae
MIKNGTCPYWERDDLSECARREYIEFKFPLFILLTGMIYAFCKVFRAFYLRGKNHTNEAPEFEEQGNGNHEYARFSVLRLKSAWESRSFCNVNNRSTFDKFKKFIEGAFIVLQLTIHLYILSSMPMDNKKFFHQGFLVQMFLWILLLVVITLRLISASQSFRWVLACKRDLWAVSFYSYASLFTLSILPLRSVFIGKIKDKIMVKYIISETFIDLALLLLLSTSSIEGTRYSFLVENENKKLPPAPTVFGLLTFSRIDRLIWKAYKHCLGNADIWDLDINNKSIAILANFEMSSKKGRLLPNIICYFKAVFISQLFLAFVSSFLNFVPSLLMPRILSYVNDPKSKSWNLVSLYVSSMLVSKIIATTCRGQGLFLGEKGTMQLRTVLISNIYSKTLRRTILKDSTTSLQKNASTSFEENPDSSEAEPRKKSSRKDNSVNNVMSIDAFKVSEAMNTFYLACEAVFMTVTALMILYSLLGWSAFAGTFALLAMIPLNFWCATFYGNYQADQLILTDKRTSGISEALNSIRVIKLLAWENLFYQKIINVRDGEIRLLKKKATIFFLNHLIWFFGPTLVSAITFSVFIKFQNQTLTPTIAFTALSLFAILRTPMDQIASTVSLLIQSFISLERIQDYLNESETRKYEILEQSNTKFGFEDASMEWEAAETSFKLKNISIDFKLNSLNAIIGPTGSGKSSLLLGLLGELNLLSGKIYVPTVESRDDLEIGKDGMTNSMAYCSQTPWLISGTIKDNVVFGEIFNKQKFDDVMKSCCLDKDIKAMTAGIRTDVGDGGFSLSGGQQQRIALARAIYSSSRYLILDDCLSAVDPETALYIYEECLCGPMMKGRTCIITSHNISLVTKRADWLVILDRGEVKSQGKPSDLIKSNEFLRESINNDSKNTTHNQIDLKRSTTSKKTKNGDPEGGNSQDEVCAEVENFEETKMEGSVKFSAYKWLADYFGGLGVVFVFTSSSILIHGITLSQGFWLRYWLDTGSSGSKSTWLYRIVEGHSNIYFLLTYIIIGLVSSFLTSGKVWIAIISGTNVTKKIFAKLLSSILYAKLRFHNVTPTGRIMNRFSKDMDIIDQQLIPNFEGLSYSVVVCLWIILLIGYVTPQFLLFAIPLCALYYTVCTLYLRASRELKRIDNINISPIHQLFAEAIKGVTTIRALADERRFITQSLVAIDRSNAPFFYLNMATEWITYRVDIIGTLVLFSSSVMIIMKAS

SEQ ID NO: 153 - DNA, 420 bp, Saccharomyces cerevisiae
atgaataagctcaaagtaagccagaacaattacctacaaagaagtgatttctataaattcgaaagaaacggcactgaatgggaatatatatttgcatcaaattcagcttgtcttgattataataataatacagctgttaataatgatataatttcgtcacttaattattgcatcagtgatgacagatattatgaaactgcagcgatgtgtgtggttttgaaattatctcaagattgctcttttgatgtgaggcttcaacgaagtggaaatgggccatataagaatatctgggatatgccttgcggagaattacaacaacacattggttacaaaaatggtatatgctataatagtgaaaacacggtgttatcggcagtaggtgtagaacatcgatatcataaaagtgtttctcgtctataa

SEQ ID NO: 154 - protein, 139 aa, Saccharomyces cerevisiae
MNKLKVSQNNYLQRSDFYKFERNGTEWEYIFASNSACLDYNNNTAVNNDIISSLNYCISDDRYYETAAMCVVLKLSQDCSFDVRLQRSGNGPYKNIWDMPCGELQQHIGYKNGICYNSENTVLSAVGVEHRYHKSVSRL

SEQ ID NO: 155 - DNA, 1239 bp, Saccharomyces cerevisiae
atgaaaattgcggtagaaacgacactattcgacttctttgtcatcgatcagtttaaaaaatctactttttcagcgccaaacaccaaagttgacactattaagggttgtattaacaagtttattgaacaatttaatgtatatgatgagcaacacatattttggcaacctcctggaaaatcaaacgtcagattgctgtcaaacgccaatgactttggccaattgggaaactttttgcataagaaaatcaaatgtaacatttttattggagaagaagcattaaggaaatacgatttaaatatctgtggaccttatgacaaatttgtagaaaattctgaccctagtgttaaaaaggttgtgaacagagatgatgtcatgttgtcgcgcaaatgtttaaacatcatatcggaacaactctctatacttgagaagtccataagtaaggctcaaaaccaagtgttgcagtcaagtgaggttgaaggaaaaaaatgtattatcttgccggaagataaaccagaactcatcaagtttttttctaaatttgaaacgagtgttcagttacaggaggtttacgagggctataaggtatatgaaaagctattacaaaaatttggtgggcaaaaaaaaagaatggagtctttcttgaatgaaaacacgccaatgtcaggtgccgaagctatcaagcaaataaatatatctgaggagctcaaggaaaaaggggaacgtttaacaacaccaaacgatccgttattacacgttgaggtgagtaatgaggataactcgctgcactttatattgtacaataaaacgaatatcataattccaggaaattgtacatttgaattttctagccaaatctccgaggtattcagtatcaaaatgggaccgcatgagataggcataaagggtcagaaagagctatggttttttccatcattacctactcctctctccaattacacaatgaaagtcgtaaaccaggatggagaaactattctggttggtaaatgtgctgactccaatgaaataactctaaaatctccactagcctcattttcgacaggcagtttccagacaggcagtttccacactttgcaagatcctactaatgttttccgggcagacgcgctttcttcccctgatgaatcaagcatcatgagcactccctttctaggcgagacagatgaagtttataattctggctctacattaagtaggccatttacttgggaagaaatataa

SEQ ID NO: 156 - protein, 412 aa, Saccharomyces cerevisiae
MKIAVETTLFDFFVIDQFKKSTFSAPNTKVDTIKGCINKFIEQFNVYDEQHIFWQPPGKSNVRLLSNANDFGQLGNFLHKKIKCNIFIGEEALRKYDLNICGPYDKFVENSDPSVKKVVNRDDVMLSRKCLNIISEQLSILEKSISKAQNQVLQSSEVEGKKCIILPEDKPELIKFFSKFETSVQLQEVYEGYKVYEKLLQKFGGQKKRMESFLNENTPMSGAEAIKQINISEELKEKGERLTTPNDPLLHVEVSNEDNSLHFILYNKTNIIIPGNCTFEFSSQISEVFSIKMGPHEIGIKGQKELWFFPSLPTPLSNYTMKVVNQDGETILVGKCADSNEITLKSPLASFSTGSFQTGSFHTLQDPTNVFRADALSSPDESSIMSTPFLGETDEVYNSGSTLSRPFTWEEI

SEQ ID NO: 157 - DNA, 1008 bp, Saccharomyces cerevisiae
atggttaatgaaaaagtgaatccattcgacttagcttcggtttctcctttagtcttaggaggtgcaatactgaaccagcaatatacagatgagccagaatccattccactggaagacataatcaaatacgcattttcgcatggtatcaatgcaattgacacttctccctactatggccctagtgaggttctttatggtagggcactgtccaatttaaggaatgaatttcccagagacacttattttatatgcacaaaggttgggcgtattggtgcggaagagtttaactattctagagatttcgtgagatttagtgttcacagatcgtgcgaaagattacacactacatatctcgatttggtgtacttgcacgatgtcgagtttgtcaaatttccagacatcttagaggcattaaaggaattgaggaccttgaagaacaaaggagttatcaaaaattttggcatatcaggctacccaatcgactttatcacctggcttgctgagtactgctctaccgaggaaagtgatattgggtcattggatgcagtattgtcctattgtaacttgaacttacaaaacaataagctattgaactttcgagaaagactgctacgcaatgctaaactgaaaatggtttgcaacgcatcaatcttgagcatgtcgctactaaggtcacaggagacaagacagtttcacccgtgttctcatgaattgagagaatgcgcatctcaggctgccaaatactgtcaagaacaaaatgtcgacttagccgatttggccacaagatacgcgatttcggaatgggtaggaaagggacccgttgttcttggagtcagtagcatggaagaattgaaacttgctctggataattacgaaattgtgaaatcgaatggcaacagattatcttctaaggacggacaactagtagaatatatccaaaagaatatttttaaagaacattttaatgaagagtggtcttcaggtattcctcatccagaaatgatataa

SEQ ID NO: 158 - protein, 335 aa, Saccharomyces cerevisiae
MVNEKVNPFDLASVSPLVLGGAILNQQYTDEPESIPLEDIIKYAFSHGINAIDTSPYYGPSEVLYGRALSNLRNEFPRDTYFICTKVGRIGAEEFNYSRDFVRFSVHRSCERLHTTYLDLVYLHDVEFVKFPDILEALKELRTLKNKGVIKNFGISGYPIDFITWLAEYCSTEESDIGSLDAVLSYCNLNLQNNKLLNFRERLLRNAKLKMVCNASILSMSLLRSQETRQFHPCSHELRECASQAAKYCQEQNVDLADLATRYAISEWVGKGPVVLGVSSMEELKLALDNYEIVKSNGNRLSSKDGQLVEYIQKNIFKEHFNEEWSSGIPHPEMI

SEQ ID NO: 159 - DNA, 1422 bp, Saccharomyces cerevisiae
atgcgatcttatatgcagattcttcaaaaatttgccaaatttattgggccagggatattagtcagtgtggcttatatggacccaggaaattatgccactagtgtttccggtggtgctcaatacaaatataccttattattctctatttttatatccaacatttttgccgtacttttgcaatgtctctgtgtgaagctgggtactatcactggctatgatttggctgaaaactgtcgtcataatttgcctaaaaagctaaactataccctttaccttttcgctgaagtggcaatcattgctactgatctggccgaggttgtaggcactgccatcgctttacaaattcttttcaaaataccactaacttggggtgtcttattaacggtgctagatgttttggtaattttaatgttctacacaccaaacggccagtccttaaaaaaagttagggttttcgaatttggcgttgggattttggtcattggaacttgcatttgctttgttttggagctgtttaaagtttcaatcccagacaaagctgaattgtttaaagggtttttgccttcaaatatcatttttaaggaacaacaagctctttacatttcattgggtatcttaggtgccactgtgatgcctcattcattatacttgggctcatccattgttaaaccaagattgcacgattacgatttgaagaaatacggtaaggttaatgcccgcccaagtttaagcgctataaaatatacgttaaactatgcgtacgctgaactaatcatttctttgttcttaattgccacctttgttaattccgctattttaattgttgcaggtgctactttatcaggccaacctgaggcagaggatgctgatttgttatctatttacaaattactggtccactacatatctcctgcggcagggttaatctttgcattggccatgttatgttctggtcaatctgccggtatcatctgtacacttgccgggcaaatcgtttctgagggatttttacagtggtctttaccaccttgggccacaagattgtgcaccagattgattgccattgtaccatgtttatttgttactttaaccatgggggaaaagggaatttcagatattttgaatttttctcaagtggtcttgtccttaattttaccaatcgtttccgctcctttaatttattttaccgcaaatagaaagttgatggttgttcatgacgaaaatggtgtggtaagagcacctgccgatgttaacgccattgctgatgaaaccactccattgaactccaagcacagtaaaatagttgattttactaacagtcgtttgttgacctatacctctgttttcgtatgggctttaatcgggagcttgaattgctatttggtgatttcctatctcttaggtgccgacatccatttttaa

SEQ ID NO: 160 - protein, 473 aa, Saccharomyces cerevisiae
MRSYMQILQKFAKFIGPGILVSVAYMDPGNYATSVSGGAQYKYTLLFSIFISNIFAVLLQCLCVKLGTITGYDLAENCRHNLPKKLNYTLYLFAEVAIIATDLAEVVGTAIALQILFKIPLTWGVLLTVLDVLVILMFYTPNGQSLKKVRVFEFGVGILVIGTCICFVLELFKVSIPDKAELFKGFLPSNIIFKEQQALYISLGILGATVMPHSLYLGSSIVKPRLHDYDLKKYGKVNARPSLSAIKYTLNYAYAELIISLFLIATFVNSAILIVAGATLSGQPEAEDADLLSIYKLLVHYISPAAGLIFALAMLCSGQSAGIICTLAGQIVSEGFLQWSLPPWATRLCTRLIAIVPCLFVTLTMGEKGISDILNFSQVVLSLILPIVSAPLIYFTANRKLMVVHDENGVVRAPADVNAIADETTPLNSKHSKIVDFTNSRLLTYTSVFVWALIGSLNCYLVISYLLGADIHF

SEQ ID NO: 161 - DNA, 915 bp, Saccharomyces cerevisiae
atgaatacttcagaactgtcaatagctgaggaaatcgactacgaagctcttccatcacatgctccgctacattcccagttactggcaggagcatttgcaggtataatggagcattctttgatgtttccaatagatgctctgaaaacccgagtgcaggctgcaggattgaataaagctgcctctacagggatgatatctcagatatccaaaatatctacaatggaaggttcgatggctttatggaagggtgttcaatcggtaatactgggggcagggcctgcgcatgcagtatattttggtacatacgagttttgcaaagctcgcctgataagccctgaagatatgcaaactcatcaaccaatgaagaccgcactgagtggtaccattgctaccattgctgcggatgcattgatgaacccctttgacaccgttaaacaaagactacaattggatactaatctaagagtttggaatgttactaagcaaatatatcaaaatgaaggctttgcagcattttactactcctatcccacaacattggccatgaatatcccatttgcagcgttcaatttcatgatatatgaatctgccagcaaattcttcaacccacaaaattcctacaatccattgattcattgtctttgcggtgggataagtggtgcaacatgtgctgcgttaactacaccgttggattgcataaagactgtattacaggttagaggcagcgaaactgtctccatcgaaataatgaaggatgcgaacacttttggtagagcctcaagagccatactggaggttcatggttggaaggggttttggcgaggtttgaaaccaaggatagtggctaatataccagccactgccatttcttggactgcatatgaatgtgctaagcattttttaatgaaaaattga

SEQ ID NO: 162 - protein, 304 aa, Saccharomyces cerevisiae
MNTSELSIAEEIDYEALPSHAPLHSQLLAGAFAGIMEHSLMFPIDALKTRVQAAGLNKAASTGMISQISKISTMEGSMALWKGVQSVILGAGPAHAVYFGTYEFCKARLISPEDMQTHQPMKTALSGTIATIAADALMNPFDTVKQRLQLDTNLRVWNVTKQIYQNEGFAAFYYSYPTTLAMNIPFAAFNFMIYESASKFFNPQNSYNPLIHCLCGGISGATCAALTTPLDCIKTVLQVRGSETVSIEIMKDANTFGRASRAILEVHGWKGFWRGLKPRIVANIPATAISWTAYECAKHFLMKN

SEQ ID NO: 163 - DNA, 498 bp, Saccharomyces cerevisiae
atgcttcctgttataacgagatttgcaaggcctgctctgatggccatcagacctgtgaatgccatgggggttttgagagcgtccagcataacgaaaaggctttatcatcccaaggtcatagagcattatacacatccaagaaacgtcggctcattagataaaaaattgcccaacgtcggcactggtctagtgggtgcgccagcgtgcggtgatgtgatgaggttgcagatcaaagtcaacgactctactggcgttattgaagatgtcaaattcaaaacttttggatgtggctccgccattgcctcctcttcatatatgactgaattggtacaggggatgaccttggacgatgcggcaaaaattaagaacactgaaattgctaaggagttgagcttgcccccagtcaagttgcattgctctatgttagcggaagatgcgatcaaggcagctattaaggactacaaatctaagagaaacactccaaccatgttatcgtaa

SEQ ID NO: 164 - protein, 165 aa, Saccharomyces cerevisiae [sequence omitted]

SEQ ID NO: 165 - DNA, 1659 bp, Saccharomyces cerevisiae
atgggtaaaattgcagagtttctcgggaatccaggtgctaggcctgacgttcatcatagagcacctactgttgactgcaaacagtacgaagaattcggtgattctaacgattacaaaaatgatgatgtggtcagagtagtcagccatagcgatgagagtactgatgacgaactttgtaatgtgaatttaacagaaacaggggcaatcttcacgagtaaaggttttaccgggttaagcaaaggtttcacagataagaccctggatttcctggtacgagtggccggttcgcaggcggttttttttattgtttggatcatcctcataatttgggtggttattggtattgtttataacgcacctttcaattggcaagttgttatgcaggacggacagtctattcaaagttatgtttgggacacactgttgatgagacaacagttgatgagtacgcatgaacaaattttgatctgcggtagattgaagtcgagattggcttccttcaaaaactatctaacaagaagcaccccagaggaagaaaaagcagactgcacagttgaagctaatgaagtcagctctgttgaaaatcatatagacccatctgccattaacggagaactgcctgtggaaaattggtacgaccgtttatctaacgtagcaagtaggtatatgggttcaattgcagcaatggtgatattttggataggtattttcgtttggattggttgcggtgctatcccaaaagatgcgggcaacactccaccttacaccggagaaactacaggtagtaatccaagattgaaaaagttcagtgacgcttggcagatgtatattaacactgcagttgcagtttcccttctaatttgcactactttcttacaaaatataagggctagacatgattatttcacggggaggtttttagttgatatctttgatatggacgagaaaatcgactatcgtataagaaagcattttaacgattttgaaacacctcacccagttgttactattgaatctaaaaaaaggtcgacagggagaaagatgattgattggtatgctgatattattggtactggtattggtgtcctgattggtgtggcagtgttcgccacatggattggtattggttcgccaatgaagtgggatgataattggtggttgattatcggtacatacacaggtttaattgggtttttggacggtttcgttttgagagaagtgtacttccgaatcgttcaacatgaagagaaaaattattctgatgtggctaaagaagaccttgaattattccaagaattaggtattgaatgtcccgaagaatttagtggtaaagctcctgaaattaacactattggttacagaacatcccaatatattaataggatctgctcaactccatggagtgttcttgtatccgtcatcatcatcattggtttaatttgtattgcttccggtttgcgttggagtacaacaggtcaattgattgctaacacgccaactatgattatcgaagaatttttcttgctagttttgttgcaagcacataattgggccgatcgtcaaagaagagtggaggttaccgctttgtacgcacgtaggcgcatacttctatcatacgtagaaaagcgtttcccagaggttatgatgttggaaaaatag

SEQ ID NO: 166 - protein, 552 aa, Saccharomyces cerevisiae
MGKIAEFLGNPGARPDVHHRAPTVDCKQYEEFGDSNDYKNDDVVRVVSHSDESTDDELCNVNLTETGAIFTSKGFTGLSKGFTDKTLDFLVRVAGSQAVFFIVWIILIIWVVIGIVYNAPFNWQVVMQDGQSIQSYVWDTLLMRQQLMSTHEQILICGRLKSRLASFKNYLTRSTPEEEKADCTVEANEVSSVENHIDPSAINGELPVENWYDRLSNVASRYMGSIAAMVIFWIGIFVWIGCGAIPKDAGNTPPYTGETTGSNPRLKKFSDAWQMYINTAVAVSLLICTTFLQNIRARHDYFTGRFLVDIFDMDEKIDYRIRKHFNDFETPHPVVTIESKKRSTGRKMIDWYADIIGTGIGVLIGVAVFATWIGIGSPMKWDDNWWLIIGTYTGLIGFLDGFVLREVYFRIVQHEEKNYSDVAKEDLELFQELGIECPEEFSGKAPEINTIGYRTSQYINRICSTPWSVLVSVIIIIGLICIASGLRWSTTGQLIANTPTMIIEEFFLLVLLQAHNWADRQRRVEVTALYARRRILLSYVEKRFPEVMMLEK

SEQ ID NO: 167 - DNA, 1869 bp, Saccharomyces cerevisiae
atgttgttctactcgttcgtgtggtctgtactggccgctagtgttgctttggcaaagacacataagttaaactataccgcttcttgggtaactgccaatcctgatggattgcatgaaaaaaggatgattggttttaatggcgaatggccacttccagatatccatgttgaaaaaggagatcgtgttgagctttatttgactaacggctttcaagacaatactgctacttctctacatttccatggtcttttccagaatacgagtttggggaaccagcttcaaatggatggtccttctatggtgacacaatgtcccatcgttccgggacaaacatacctgtacaacttcactgtcccagagcaggtaggaacgttctggtaccatgcacacatgggtgcccagtacggtgacggtatgaggggtgcatttatcatccacgatccggaggagcccttcgaatatgatcatgaacgagtcatcactctatcggaccattatcacgaaaattataaaacggttaccaaagagtttctgtcaagatataatccaaccggtgctgaacctattcctcaaaatattctttttaataatacgatgaatgtaactttagattttacacccggtgaaacgtatctcttcaggttcttgaacgttgggctgtttgtatcccagtatatcattcttgaggatcatgaaatgagtatagtagaggtggacggtgtttacgtaaagccaaactttactgattcgatatatctttctgcggggcaaagaatgagtgtgttgattaaagctaaagataaaatgcctacaagaaactacgctatgatgcaaataatggatgagacgatgcttgatgttgtcccacctgagttacaactcaaccaaactatccaaatgaggtatggccactcgttgccggaggcacgcgcattgaacattgaagattgtgacttggaccgcgccacgaatgacttttacctagaacctctgattgagagagacctacttgctcactatgaccaccaaattgtcatggatgtaagaatggtcaacttgggtgatggtgtgaagtatgcatttttcaataatatcacttacgtcacaccaaaggtgcctactttgacaacgttgcttacctcaggaaagcttgcgtcagatcctagaatttatggtgataatatcaatgcgcagttattgaaacataatgatatcatagaggttgttctaaacaattatgattctggcagacatccattccatttgcacggtcataatttccaaatagtccaaaagtcgccagggttccatgttgatgaagcttatgacgaatctgagcaagatgaaatgaccgtcccttataacgaatctgcgccattacaaccgttccctgagaggccgatggtgagagatacagtggttcttgaacctagtggacatgttgtcctgagatttagagctgacaaccctggtgtctggtatttccattgtcatgtagattggcacttacaacaaggtttggcttcggtctttattgaggcacccgttttacttcaggaaagggaaaagcttaatgagaactatctggatatatgcaaagccgctgatattccggtagttggtaatgctgcaggtcattcgaatgattggtttgacttaaaaggattaccaagacaacctgagccactaccaaagggatttactactgaaggatatttggcattgattatttcaaccattatcggtgtctggggcctatattccattgctcagtatggtattggcgaggttatccctaacgatgagaaggtgtaccacacgttaagggaaatcttggctgaaaatgaaatagaggtttctcgcggctaa

SEQ ID NO: 168 - protein, 622 aa, Saccharomyces cerevisiae
MLFYSFVWSVLAASVALAKTHKLNYTASWVTANPDGLHEKRMIGFNGEWPLPDIHVEKGDRVELYLTNGFQDNTATSLHFHGLFQNTSLGNQLQMDGPSMVTQCPIVPGQTYLYNFTVPEQVGTFWYHAHMGAQYGDGMRGAFIIHDPEEPFEYDHERVITLSDHYHENYKTVTKEFLSRYNPTGAEPIPQNILFNNTMNVTLDFTPGETYLFRFLNVGLFVSQYIILEDHEMSIVEVDGVYVKPNFTDSIYLSAGQRMSVLIKAKDKMPTRNYAMMQIMDETMLDVVPPELQLNQTIQMRYGHSLPEARALNIEDCDLDRATNDFYLEPLIERDLLAHYDHQIVMDVRMVNLGDGVKYAFFNNITYVTPKVPTLTTLLTSGKLASDPRIYGDNINAQLLKHNDIIEVVLNNYDSGRHPFHLHGHNFQIVQKSPGFHVDEAYDESEQDEMTVPYNESAPLQPFPERPMVRDTVVLEPSGHVVLRFRADNPGVWYFHCHVDWHLQQGLASVFIEAPVLLQEREKLNENYLDICKAADIPVVGNAAGHSNDWFDLKGLPRQPEPLPKGFTTEGYLALIISTIIGVWGLYSIAQYGIGEVIPNDEKVYHTLREILAENEIEVSRG

SEQ ID NO: 169 - DNA, 1398 bp, Saccharomyces cerevisiae
atggcgtttgaggattatttttctttccagatattcttcattttcttaaggaaatccttagaaattgttgtcattgtttctatcctgttgacgatcgtcaaacaagatctgtctgttgaggacgacagcccgtttgaaggaagttcctcttctgctggtcttccaagtccaaatacgaacacaaacgcagattcgaccactgccttcttacaagcagggccttcagacggtaatgctattggaacgtccgctacggctgctaataataaatcgaggccgctaaatgtggaggaagaagaagaaatttacgagtactctaatgagcttagagaccaggaccgcgagtccgatgaacatacggctgacaacgttaagctatatcagaaattaaaaatacaaattctagcgggcggcgcatttggtttgttgctgtgtatgttaatcgggggtgcgtttgttagtatcttttatcatattggaaccgacttatggacactgagtgaacattattatgaaggtgtcttaagtcttgtcgcgtccgttattatttctgtcatggggttgttttttttaagaatggggaagttaagagagaagttcagagtgaaattagcttctatcatttattcaaaggacaataatttgctgggaaacaaaacccaaaaaggtgtgaaattcagtcaaaagtactccttcttcatattaccatttataacgactttgagagaagggttagaagctgtgtattcaattggaggtatcggtattgaccaaccactatcctcgattcccctctctatggtccttgctactgcaatcagtacggtgttcggtatttttttcttcaggtactcaagttctctttcacttaagatatgccttgtagtcgccacctgcttcctctacttgatcgcggctggtttgttttccaaaggtgtatggcaacttgaattgcaagactacgtcaacaaatgtaacggtcaagacatgagtgaagtagaaaatggacccggttcgtacgacatatctcgttctgtttggcatgttaattgttgcaatggtgaaaaagatggaggttggatgatttttactgccatttttggttggacgaatagtgctaccgtcggctctgtaattagctacaacgcctactggttggtattaaaatacgctttgaagcttctaatgatagaaggaaaatgcggatatatcccatatctacctattagctggcaaaagaaacgtattatgaaaagattaagcattgccaaggcatcgctcgatctcaaacatcatacttctgaactcaactctagcacatcagagccagacagtcaaagacggtccaaagatagttctgtgcccctaataattgatagcagtggttcagcaaattga

SEQ ID NO: 170 - protein, 465 aa, Saccharomyces cerevisiae
MAFEDYFSFQIFFIFLRKSLEIVVIVSILLTIVKQDLSVEDDSPFEGSSSSAGLPSPNTNTNADSTTAFLQAGPSDGNAIGTSATAANNKSRPLNVEEEEEIYEYSNELRDQDRESDEHTADNVKLYQKLKIQILAGGAFGLLLCMLIGGAFVSIFYHIGTDLWTLSEHYYEGVLSLVASVIISVMGLFFLRMGKLREKFRVKLASIIYSKDNNLLGNKTQKGVKFSQKYSFFILPFITTLREGLEAVYSIGGIGIDQPLSSIPLSMVLATAISTVFGIFFFRYSSSLSLKICLVVATCFLYLIAAGLFSKGVWQLELQDYVNKCNGQDMSEVENGPGSYDISRSVWHVNCCNGEKDGGWMIFTAIFGWTNSATVGSVISYNAYWLVLKYALKLLMIEGKCGYIPYLPISWQKKRIMKRLSIAKASLDLKHHTSELNSSTSEPDSQRRSKDSSVPLIIDSSGSAN

SEQ ID NO: 171 - DNA, 3015 bp, Saccharomyces cerevisiae
atgagagaagtgatacttgctgtacatggaatgacatgcagcgcctgtactaatacaatcaatacgcagttacgagctttaaagggtgtaacaaaatgtgatattagtttagtgactaatgagtgccaggtgacatacgataacgaggttaccgccgattctattaaggaaattatagaggattgtggatttgactgtgagatactaagagattctgaaattacagccataagtacgaaggaaggactactgagtgtacaaggtatgacctgtgggtcttgtgtttctacagtcaccaaacaagtggaaggcattgagggtgttgaatcggtagtcgtttccttggtaacggaagagtgccatgttatttatgaaccgtccaagacaacgctagaaaccgccagagaaatgattgaagactgtggatttgactcaaatattattatggatggcaacgggaatgcagacatgaccgaaaaaacggtgatcttgaaagtaactaaggctttcgaggacgaatccccactcatactttcttcagtaagcgaaaggtttcaatttttgttagacctaggtgtaaaatcgatagaaatttctgatgatatgcacacactcaccataaaatactgttgtaacgaactcggcattagagatttattgaggcaccttgagaggaccggatataaattcactgtattttccaatttagataatactacccagttaaggcttctctctaaagaggacgagataagattctggaaaaaaaacagcataaaatccacccttttggctataatatgtatgctattgtatatgattgtccctatgatgtggccaacaattgttcaggaccgcatattcccttacaaagaaacctcctttgttagaggtctgttctacagagatattttgggtgtaatattggcaagctatattcagttcagcgttggtttttacttttacaaggcagcatgggcatctttaaagcacggttcaggaaccatggatacactagtttgtgtttccactacttgtgcatacacattttctgtgttttctttagttcacaatatgttccatccctcaagtactggcaaactcccaaggatcgttttcgacacatcaatcatgatcatttcatatatttccatcgggaaatatttggaaactttagctaaatcacaaacatcaaccgcactttctaaattaattcagctcactccatcggtgtgttcaattatatctgacgtggagcggaatgaaaccaaggaaattcccatagaattattgcaagtgaacgatatagtggagattaaaccagggatgaaaattcctgctgatggcatcataacaagaggtgaatctgaaattgacgagtcgttaatgacaggcgaatccattttggtgcccaagaaaactggttttccggttattgctggttctgttaatggacctggacatttctacttcagaactactaccgttggggaggaaactaaattagcaaatattatcaaggtaatgaaagaagcacaattgagtaaagctcccattcaggggtatgcagattatttagcctctatttttgttccggggatcctaattttggcagtattgactttctttatttggtgttttattttaaacatctcggctaatcctcccgtcgctttcaccgcaaatactaaggctgataatttttttatttgcttacaaactgctacttctgttgtcatcgtcgcatgcccatgtgcattgggacttgccacgccgactgctataatggtgggtacaggggttggagctcagaatggtgtcttaataaagggcggagaagtattggaaaaattcaatagtattactacttttgtttttgataaaacaggtaccttaactacaggttttatggttgtgaaaaagttccttaaagattcaaattgggttggaaacgtggatgaagacgaagttctcgcctgtataaaagcaacggaatccattagtgaccatccagtttcgaaagcaattatacgttattgtgatggtttgaactgtaataaggctttaaatgccgttgttttagaaagcgaatacgtgcttggaaagggaatagtctcaaagtgtcaagttaatggaaatacttatgatatttgtattgggaacgaggcgctgattttggaggatgcattaaaaaaatccggatttattaacagtaatgtcgaccaaggaaacactgtatcatacgtatcagtaaacgggcatgtgtttggcttgttcgagattaatgatgaagttaaacatgattcttacgcaacagttcagtatctacaaagaaatggatatgaaacgtatatgattactggcgataataactcagcagcaaaaagagtcgctagagaagtaggtataagcttcgaaaatgtttacagcgatgtgtcacccacaggcaaatgtgatctcgtgaaaaaaattcaagataaagaaggtaataacaaggttgctgttgttggcgatggcattaacgacgctcccgctttagcactgagtgatctaggtattgccatttcaacaggtacggagattgctattgaagcagctgatattgttatactgtgcggtaatgatctgaatactaatagtttgagaggactggccaacgccatcgatatttcactaaaaacgttcaaaagaataaagctgaatttgttctgggcactttgctataatatattcatgattccgattgctatgggtgtgctcattccttggggcataactcttcctccaatgctcgccggtttagcgatggcattcagctcggtcagtgtcgttctaagttcattgatgttgaagaagtggactccaccggatattgaatcacatgggatttcagatttcaagtccaaattttcgattgggaatttttggtcaaggcttttttctacgcgggctattgcaggtgagcaagacatagaatcacaggccggactaatgtcaaacgaagaagtcttgtaa

SEQ ID NO: 172 - protein, 1004 aa, Saccharomyces cerevisiae
MREVILAVHGMTCSACTNTINTQLRALKGVTKCDISLVTNECQVTYDNEVTADSIKEIIEDCGFDCEILRDSEITAISTKEGLLSVQGMTCGSCVSTVTKQVEGIEGVESVVVSLVTEECHVIYEPSKTTLETAREMIEDCGFDSNIIMDGNGNADMTEKTVILKVTKAFEDESPLILSSVSERFQFLLDLGVKSIEISDDMHTLTIKYCCNELGIRDLLRHLERTGYKFTVFSNLDNTTQLRLLSKEDEIRFWKKNSIKSTLLAIICMLLYMIVPMMWPTIVQDRIFPYKETSFVRGLFYRDILGVILASYIQFSVGFYFYKAAWASLKHGSGTMDTLVCVSTTCAYTFSVFSLVHNMFHPSSTGKLPRIVFDTSIMIISYISIGKYLETLAKSQTSTALSKLIQLTPSVCSIISDVERNETKEIPIELLQVNDIVEIKPGMKIPADGIITRGESEIDESLMTGESILVPKKTGFPVIAGSVNGPGHFYFRTTTVGEETKLANIIKVMKEAQLSKAPIQGYADYLASIFVPGILILAVLTFFIWCFILNISANPPVAFTANTKADNFFICLQTATSVVIVACPCALGLATPTAIMVGTGVGAQNGVLIKGGEVLEKFNSITTFVFDKTGTLTTGFMVVKKFLKDSNWVGNVDEDEVLACIKATESISDHPVSKAIIRYCDGLNCNKALNAVVLESEYVLGKGIVSKCQVNGNTYDICIGNEALILEDALKKSGFINSNVDQGNTVSYVSVNGHVFGLFEINDEVKHDSYATVQYLQRNGYETYMITGDNNSAAKRVAREVGISFENVYSDVSPTGKCDLVKKIQDKEGNNKVAVVGDGINDAPALALSDLGIAISTGTEIAIEAADIVILCGNDLNTNSLRGLANAIDISLKTFKRIKLNLFWALCYNIFMIPIAMGVLIPWGITLPPMLAGLAMAFSSVSVVLSSLMLKKWTPPDIESHGISDFKSKFSIGNFWSRLFSTRAIAGEQDIESQAGLMSNEEVL

SEQ ID NO: 173 - DNA, 2160 bp, Saccharomyces cerevisiae
atgttgttggtacatattatatctttccttctgttcttccagctttcggccgcaaaggccccacccagtaaaacgtctctaataaatactcatgagagaaggtcgatatattcatgctacgttggtttacgtaaagaaacatgggggttcaatgggtccgctatatgtcggtatgaaccagcaatccaatcgatgctttactgtctttacgaagacacgcatgagaaagggtattcaaataaaactttggagaaaggttttgaagaaatgagacaattttgctatacaccaaagtttttgaacatgactgatgccgagttttacacctcattggataatggaacatactatatacaagatcaacctaaagctggcatcaatatcacttatcctatcagactgaacactacactaagaaaagcatactatgatgcatactatggttactactataaccatgacattccgtattatttcgggggcattatctgtgcatactttgtgggtgtcatgttgcttgcaggtttaattcgttttttgaattataccccaataaaaaagattatgtttcagcaaaagctagtcaattacgtgagaggttatactactctacccactctttatgaaaagcatgcagagcccttctcgtacttaaaagtgataacaggctatcttcctactaggtttgaaacgttggttattttaggctacctcatacttcataccattttcatggcctacaaatatcaatatgatccataccacatcatatttgccgctcatagagcagaagtggcacattttgttgcgtacagaagcggtatactttcttttgcacacctgccactcattgttttatttgcgggaagaaataactttctccaacttatttctggcttgaagcatacctcattcattgtgttccataagtggctgggaagaatgatgtttcttgatgcaataattcatgctgccggctttacgaactattatttgtattataaaaaatggaatacggttagattaagagtctactggaaattcggtattgctaccacctgtttagcgggaatgttaattttcttttccatcgcagcatttagaagacactactatgaaacgtttatggccctccatatagtattcgcagcactatttctctatacttgttgggagcatgttactaacttcagcggtatcgaatggatttacgcggcaatagcaatttggggagttgatagaattgtacgtatcaccagaattgcactcttaggatttcctaaagcagatctacaactggttggatctgatttggtccgtgtaacggttaaaaaaccaaagaagttttggaaggcaaaaccaggccaatacgttttcgtttccttcttgcgtccattgtgcttctggcagtcgcatccatttacagtgatggattcttgcgtaaacgatagagaattggtcatcgttctgaaagcaaagaaaggtgtgacaaaactggtaagaaactttgttgaacgtaaaggcggcaaggcatccatgagattagctatcgaaggcccttatggctccaagtccaccgcccatcgctttgataatgtattattgttggcaggtggctcagggcttcccggtccaatttctcatgcccttgaattaggaaagacaacagctgcaagcggtaaaaactttgtacagttagtcatagcagtaagaggactagacatgctcaacgcgtgtaagaaagaactaatggcattaaagggcttgaatgttcaagttcacatttataattctaagcaagagctagcttcggctgaaaaaatttcctcaaatgaagtcaaaaacggtgaaacgacagcagagaaggccccatctagtctaagcaattcagaaaaagctccttctgaaagtgaaaatacagaactacctctttccctgaatgacacgtctatctccgatttagaatttgccactttccatgttggaaggccaaatgttgaagaaatactaaatgaatctgttaaccattctggttcacttgccgtcgtatgttgcggaccacctattttcgtcgacaccgctagaaatcaaactgccaaagctgttatcagaaacccatcaagaatgattgaatacttggaggaataccaagcctggtga

SEQ ID NO: 174 - protein, 719 aa, Saccharomyces cerevisiae
MLLVHIISFLLFFQLSAAKAPPSKTSLINTHERRSIYSCYVGLRKETWGFNGSAICRYEPAIQSMLYCLYEDTHEKGYSNKTLEKGFEEMRQFCYTPKFLNMTDAEFYTSLDNGTYYIQDQPKAGINITYPIRLNTTLRKAYYDAYYGYYYNHDIPYYFGGIICAYFVGVMLLAGLIRFLNYTPIKKIMFQQKLVNYVRGYTTLPTLYEKHAEPFSYLKVITGYLPTRFETLVILGYLILHTIFMAYKYQYDPYHIIFAAHRAEVAHFVAYRSGILSFAHLPLIVLFAGRNNFLQLISGLKHTSFIVFHKWLGRMMFLDAIIHAAGFTNYYLYYKKWNTVRLRVYWKFGIATTCLAGMLIFFSIAAFRRHYYETFMALHIVFAALFLYTCWEHVTNFSGIEWIYAAIAIWGVDRIVRITRIALLGFPKADLQLVGSDLVRVTVKKPKKFWKAKPGQYVFVSFLRPLCFWQSHPFTVMDSCVNDRELVIVLKAKKGVTKLVRNFVERKGGKASMRLAIEGPYGSKSTAHRFDNVLLLAGGSGLPGPISHALELGKTTAASGKNFVQLVIAVRGLDMLNACKKELMALKGLNVQVHIYNSKQELASAEKISSNEVKNGETTAEKAPSSLSNSEKAPSESENTELPLSLNDTSISDLEFATFHVGRPNVEEILNESVNHSGSLAVVCCGPPIFVDTARNQTAKAVIRNPSRMIEYLEEYQAW

SEQ ID NO: 175 - DNA, 471 bp, Saccharomyces cerevisiae
atgttcgccagactcgctaatcctgcccacttcaagcctctcacgggctcccacataacaagagctgccaaaagactttaccatcctaaggtaattgaccactacacaaacccaagaaacgttgggtccatggataagtccttagctaatgtcggcacaggaatcgtgggcgcccctgcgtgtggtgatgtgataaaactacaaatacaggtgaatgataaatcgggtattatcgagaacgttaagttcaagaccttcgggtgtgggtctgccatcgcttcctcctcctacatgaccgagctggtacgcggtatgtcacttgatgaggccgttaaaattaaaaacacggaaatcgcgaaggagctaagtcttcctccagtaaaactgcattgttccatgcttgcagaagacgctatcaaggcggcaatcaaggactacaaaacaaagaggaacccctccgttttgcattga

SEQ ID NO: 176 - protein, 156 aa, Saccharomyces cerevisiae
MFARLANPAHFKPLTGSHITRAAKRLYHPKVIDHYTNPRNVGSMDKSLANVGTGIVGAPACGDVIKLQIQVNDKSGIIENVKFKTFGCGSAIASSSYMTELVRGMSLDEAVKIKNTEIAKELSLPPVKLHCSMLAEDAIKAAIKDYKTKRNPSVLH

SEQ ID NO: 177 - DNA, 954 bp, Saccharomyces cerevisiae
atggaggacagtagcaatacaatcataccctcacccactgacgtgggggcgctagcaaacagaatcaactttcaaaccagagatgcccacaataaaatcaataccttcatgggcataaagatggccatcgccatgagacatggctttatatacagacagggtattctggcgtactattatgtgttcgatgccatcgagcaagagatagatcgcctactgaatgaccccgtaacggaggaggagctgcaaacttcgaccattctgaagcagttttggctcgaagattttagaagatctacgcagatctataaggacctgaagctgctatactcaaacacgtttaaaagcacagaatcattaaacgaattcctggctacgttccagaagccaccgctactacagcagtttatcaataacatccacgaaaacatacacaaggagccatgcaccattctttcttactgtcacgttctgtacttggcgcttttcgccggcggcaagctaatacgatcgaatttgtacagaagactggggctcttccccaacttcgagaagctatcacagaaggaactggtcaaaaagggcacaaacttcttcaccttcagcgatctgggtcccactgaagaaacacgcttgaaatgggaatacaagaagaactatgagctggccaccaggacggaattgaccgaagcacaaaagttgcagatcattagcgtcgcagaaggcatttttgattggaacttcaacatcgttgcagaaattggagagttgaatcgtcgcgagttaatgggcaagttcagcttcaagtgtattacgtacttgtacgaagaatggatgttcaacaaggattctgctactagaagagcactccacacggtcatgctgctggtgctttctattatcgcgatctgggttctttacttcttggtaaagagttttcttagcatagtataa

SEQ ID NO: 178 - protein, 317 aa, Saccharomyces cerevisiae
MEDSSNTIIPSPTDVGALANRINFQTRDAHNKINTFMGIKMAIAMRHGFIYRQGILAYYYVFDAIEQEIDRLLNDPVTEEELQTSTILKQFWLEDFRRSTQIYKDLKLLYSNTFKSTESLNEFLATFQKPPLLQQFINNIHENIHKEPCTILSYCHVLYLALFAGGKLIRSNLYRRLGLFPNFEKLSQKELVKKGTNFFTFSDLGPTEETRLKWEYKKNYELATRTELTEAQKLQIISVAEGIFDWNFNIVAEIGELNRRELMGKFSFKCITYLYEEWMFNKDSATRRALHTVMLLVLSIIAIWVLYFLVKSFLSIV

SEQ ID NO: 179 - DNA, 690 bp, Saccharomyces cerevisiae
atggatggaaatcataggtttactccagattccaaagaatttaatactgttgtaaaaagtaaagagtcttccactggcagaaatccgtatcagactccgcccttagagcacaacggtactcatcatcagacaaattacagcagaaagaaaacaaatctagcaattatcatatcgaatttcttgtccgagatcagtcggcctctttcaaatggcaaaatcaataattctacccacaacattttaaaatttctaaatgaagtgcttaagagatcgaagtgcagtaaagaaaacgctgtgttagccactttctactttcaaaagattcaccaatccagaggtgtccgggatgagtcctcattgcctgaattctcgcactgttcccgcagaatttttctctgctgtcttattctatcgcacaaatttttgaacgacaacacttactcgatgaaaaattggcaaattataagtgggctccatgcaaaggatctatctctaatggaaagatggtgtctgggtaagctgaattatgagctggccattccatatgacgagtttttgctatgggaaacgaacactttaatgaaagcgaaattgcgcgtcggaactcccgccaacgctccggtgaagagacccagagaatcagacaatgattatgatgcaaattcttggaaacagattaaatcttgttaa

SEQ ID NO: 180 - protein, 229 aa, Saccharomyces cerevisiae
MDGNHRFTPDSKEFNTVVKSKESSTGRNPYQTPPLEHNGTHHQTNYSRKKTNLAIIISNFLSEISRPLSNGKINNSTHNILKFLNEVLKRSKCSKENAVLATFYFQKIHQSRGVRDESSLPEFSHCSRRIFLCCLILSHKFLNDNTYSMKNWQIISGLHAKDLSLMERWCLGKLNYELAIPYDEFLLWETNTLMKAKLRVGTPANAPVKRPRESDNDYDANSWKQIKSC

SEQ ID NO: 181 - DNA, 411 bp, Saccharomyces cerevisiae
atgtcctctgtggaatcttcccccatctcgcgctatgaagacgaggtcttccctctttcgttttcaaacgttgctttcgagccccctatgctctcgcatagcccggacagatcgacttatgccgatgacttttctcaatcttaccagcaagaattgctaacttttccgctatcgtacccgattgtcgatgagtcagaatgcacgcacactaaagataagacggacagcaacataataacgagtactgaagacgattgcatgttcgatatggaatttaacggcaacgccgccagtgcagttgctgctgctagtaaggaatctaactctgcctctgggtttgcctttgcaagtaacgatgcctttgccaatgtcgcacaacagaactacagactgtggttgtcatcggtatga

SEQ ID NO: 182 - protein, 136 aa, Saccharomyces cerevisiae
MSSVESSPISRYEDEVFPLSFSNVAFEPPMLSHSPDRSTYADDFSQSYQQELLTFPLSYPIVDESECTHTKDKTDSNIITSTEDDCMFDMEFNGNAASAVAAASKESNSASGFAFASNDAFANVAQQNYRLWLSSV

SEQ ID NO: 183 - DNA, 900 bp, Saccharomyces cerevisiae
atgaaactttctaaattatcgatcttaacctccgccttagccacgtctgcattggccgctcctgccgttgttactgtcactgaacacgcccatgaggctgcagtcgttactgtgcaaggcgtagtttatgtcgaaaacggccaaacacgtacaacttacgaaacactagctcctgcttccactgccactccaacttctacagctacagctttggttgctccccctgtcgctccttcctctgcttccagcaattccgatgtggtcttgtctgctttgaagaacttagcctctgtttggggtaaaactaccgattcaacgaccacgttgacatcttctgaatctacatcgcaatcgttggctcaagctactacgacttctacacccgctgctgcttccaccacttccacacccgctgctaccaccaccacttctcaagccgctgctactagctcagcatcgtcttcggatagtgacctgtcagattttgcctcttctgtgttggctgaacacaacaagaagagagctttgcacaaggacacaccagctttgtcctggtccgatactttggcctcctacgctcaagactatgctgacaactatgattgctccggcactttgacccattctggcggtccatacggtgaaaacttggctttgggttatgacggcccagctgccgtcgacgcttggtacaatgaaatttccaactacgacttctcgaatccaggcttttcaagtaacactggccactttactcaagtcgtttggaagtccaccacccaagttggttgtggcatcaaaacctgtggcggtgcatggggtgactatgtcatctgtagttacgaccccgcaggaaactacgaaggcgaatacgccgataatgtcgagcccctagcttaa

SEQ ID NO: 184 - protein, 299 aa, Saccharomyces cerevisiae
MKLSKLSILTSALATSALAAPAVVTVTEHAHEAAVVTVQGVVYVENGQTRTTYETLAPASTATPTSTATALVAPPVAPSSASSNSDVVLSALKNLASVWGKTTDSTTTLTSSESTSQSLAQATTTSTPAAASTTSTPAATTTTSQAAATSSASSSDSDLSDFASSVLAEHNKKRALHKDTPALSWSDTLASYAQDYADNYDCSGTLTHSGGPYGENLALGYDGPAAVDAWYNEISNYDFSNPGFSSNTGHFTQVVWKSTTQVGCGIKTCGGAWGDYVICSYDPAGNYEGEYADNVEPLA

SEQ ID NO: 185 - DNA, 939 bp, Saccharomyces cerevisiae
atgtcatttcaccaacagttctttaccttgaataatggaaataaaatccccgcaatcgccatcattgggacaggtactagatggtataaaaacgaagaaacggatgctaccttttcgaacagtttggtcgaacagattgtttatgctctgaagttacctggcattattcacattgatgctgctgagatctacagaacatatccagaagttgggaaggcacttagcctcaccgaaaaaccaagaaatgcaatattcttgacagacaagtactcacctcaaatcaagatgtcagattccccagcggatggactagatttagctttgaagaagatgggcactgactatgtcgatctataccttttgcatagcccatttgtttccaaagaggtcaacgggttaagtttggaggaagcctggaaggacatggagcaattgtacaaatcaggtaaagctaaaaatatcggtgtttccaactttgctgtggaagacttgcaaagaattctgaaagttgcggaagtcaagccccaagttaatcaaattgagttcagtcccttcttgcagaatcaaacaccagggatctacaaattttgccaagaacatgatatattggtagaagcatactcgccactaggtcccttacaaaagaaaacagcacaagatgactctcaaccgtttttcgaatacgtgaaagagttatccgagaaatatatcaaatctgaagcccaaattatcctacgttgggtgaccaaacgtggcgtgttgcctgtaaccacctcttccaaacctcaaagaatttctgacgcgcaaaatttattctctttcgacttgacggctgaggaagtcgataagataacggagttgggcttggaacatgaaccgctaagattgtattggaataaattgtacggtaaatacaactacgctgctcaaaaagtataa

SEQ ID NO: 186 - protein, 312 aa, Saccharomyces cerevisiae
MSFHQQFFTLNNGNKIPAIAIIGTGTRWYKNEETDATFSNSLVEQIVYALKLPGIIHIDAAEIYRTYPEVGKALSLTEKPRNAIFLTDKYSPQIKMSDSPADGLDLALKKMGTDYVDLYLLHSPFVSKEVNGLSLEEAWKDMEQLYKSGKAKNIGVSNFAVEDLQRILKVAEVKPQVNQIEFSPFLQNQTPGIYKFCQEHDILVEAYSPLGPLQKKTAQDDSQPFFEYVKELSEKYIKSEAQIILRWVTKRGVLPVTTSSKPQRISDAQNLFSFDLTAEEVDKITELGLEHEPLRLYWNKLYGKYNYAAQKV

SEQ ID NO: 187 - DNA, 636 bp, Saccharomyces cerevisiae; identical to SEQ ID NO: 147

SEQ ID NO: 188 - protein, 211 aa, Saccharomyces cerevisiae; identical to SEQ ID NO: 148

SEQ ID NO: 189 - DNA, 32 bp, Artificial Sequence
  Primer oGV3432
ttattcggtaccatgaagcacgagctacagac

SEQ ID NO: 190 - DNA, 34 bp, Artificial Sequence
  Primer oGV3433
gaataacctaggtgattgaaaaaagccgtgaggt

SEQ ID NO: 191 - DNA, 1205 bp, Artificial Sequence
  Cassette for introducing a deletion in K. marxianus URA3
caaccactgcagccagcagttaaagcaccaacaagtgacgaattctgattggaaagaccattctgctttacttttagagcatcttggtcttctgagctcattatacctcaatcaaaactgaaattaggtgcctgtcacggctctttttttactgtacctgtgacttcctttcttatttccaaggatgctcatcacaatacgcttctagatctattatgcattataattaatagttgtagctacaaaaggtaaaagaaagtccggggcaggcaacaatagaaatcggcaaaaaaaactacagaaatactaagagcttcttccccattcagtcatcgcatttcgaaacaagaggggaatggctctggctagggaactaaccaccatcgcctgactctatgcactaaccacgtgactacatatatgtgatcgtttttaacatttttcaaaggctgtgtgtctggctgtttccattaattttcactgattaagcagtcatattgaatctgagctcatcaccaacaagaaatactaccgtaaaagtgtaaaagttcgtttaaatcatttgtaaactggaacagcaagaggaagtatcatcagctagccccataaactaatcaaaggaggatgtcgaatcaccaatgcacacggtgtgactggtgcgggcattgttgctggtttgaagcaaggtgccgaggaagttacgaaagaacctagagggttgttaatgcttgccgagttatcgtccaaggggtctctagcgcacggtgaatacactcgtgggaccgtggaaattgccaagagtgataaggactttgttattggatttattgctcaaaacgatatgggtggaagagaagagggctacgattggttgatcatgacgccaggtgttggtcttgatgacaaaggtgatgctttgggacaacaatacagaactgtggatgaagttgttgccggtggatcagacatcattattgttggtagaggtcttttcgcaaagggaagagatcctgtagtggaaggtgagagatacagaaaggcgggatgggacgcttacttgaagagagtaggcagatccgcttaagagttctccgagaacaagcagaggttcgagtgtactcggatcagaagttacaagttgatcgtttatatataaactatacagagatgttagagtgtaatggcattgcgtcggatcctgtgag

SEQ ID NO: 192 - DNA, 3855 bp, Artificial Sequence
  Plasmid pGV1799
tcgcgcgtttcggtgatgacggtgaaaacctctgacacatgcagctcccggagacggtcacagcttgtctgtaagcggatgccgggagcagacaagcccgtcagggcgcgtcagcgggtgttggcgggtgtcggggctggcttaactatgcggcatcagagcagattgtactgagagtgcaccatatgcggtgtgaaataccgcacagatgcgtaaggagaaaataccgcatcaggcgccattcgccattcaggctgcgcaactgttgggaagggcgatcggtgcgggcctcttcgctattacgccagctggcgaaagggggatgtgctgcaaggcgattaagttgggtaacgccagggttttcccagtcacgacgttgtaaaacgacggccagtgaattcgagctcggtacccggggatccgacgcaatgccattacactctaacatctctgtatagtttatatataaacgatcaacttgtaacttctgatccgagtacactcgaacctctgcttgttctcggagaactcttaagcggatctgcctactctcttcaagtaagcgtcccatcccgcctttctgtatctctcaccttccactacaggatctcttccctttgcgaaaagacctctaccaacaataatgatgtctgatccaccggcaacaacttcatccacagttctgtattgttgtcccaaagcatcacctttgtcatcaagaccaacacctggcgtcatgatcaaccaatcgtagccctcttctcttccacccatatcgttttgagcaataaatccaataacaaagtccttatcactcttggcaatttccacggtcccacgagtgtattcaccgtgcgctagagaccccttggacgataactcggcaagcattaacaaccctctaggttctttcgtaacttcctcggcaccttgcttcaaaccagcaacaatgcccgcaccagtcacaccgtgtgcattggtgattcgacatcctcctttgattagtttatggggctagctgatgatacttcctcttgctgttccagtttacaaatgatttaaacgaacttttacacttttacggtagtatttcttgttggtgatgagctcagattcaatatgactgcttaatcagtgaaaattaatggaaacagccagacacacagcctttgaaaaatgttaaaaacgatcacatatatgtagtcacgtggttagtgcatagagtcaggcgatggtggttagttccctagccagagccattcccctcttgtttcgaaatgcgatgactgaatggggaagaagctcttagtatttctgtagttttttttgccgatttctattgttgcctgccccggactttcttttaccttttgtagctacaactattaattataatgcataatagatctagaagcgtattgtgatgagcatccttggaaataagaaaggaagtcacaggtacagtaaaaaaagagccgtgacaggcacctaatttcagttttgattgaggtataatgagctcagaagaccaagatgctctaaaagtaaagcagaatggtctttccaatcagaattcgtcacttgttggtgctttaactgctggctgcaggcatgcaagcttggcgtaatcatggtcatagctgtttcctgtgtgaaattgttatccgctcacaattccacacaacatacgagccggaagcataaagtgtaaagcctggggtgcctaatgagtgagctaactcacattaattgcgttgcgctcactgcccgctttccagtcgggaaacctgtcgtgccagctgcattaatgaatcggccaacgcgcggggagaggcggtttgcgtattgggcgctcttccgcttcctcgctcactgactcgctgcgctcggtcgttcggctgcggcgagcggtatcagctcactcaaaggcggtaatacggttatccacagaatcaggggataacgcaggaaagaacatgtgagcaaaaggccagcaaaaggccaggaaccgtaaaaaggccgcgttgctggcgtttttccataggctccgcccccctgacgagcatcacaaaaatcgacgctcaagtcagaggtggcgaaacccgacaggactataaagataccaggcgtttccccctggaagctccctcgtgcgctctcctgttccgaccctgccgcttaccggatacctgtccgcctttctcccttcgggaagcgtggcgctttctcatagctcacgctgtaggtatctcagttcggtgtaggtcgttcgctccaagctgggctgtgtgcacgaaccccccgttcagcccgaccgctgcgccttatccggtaactatcgtcttgagtccaacccggtaagacacgacttatcgccactggcagcagccactggtaacaggattagcagagcgaggtatgtaggcggtgctacagagttcttgaagtggtggcctaactacggctacactagaaggacagtatttggtatctgcgctctgctgaagccagttaccttcggaaaaagagttggtagctcttgatccggcaaacaaaccaccgctggtagcggtggtttttttgtttgcaagcagcagattacgcgcagaaaaaaaggatctcaagaagatcctttgatcttttctacggggtctgacgctcagtggaacgaaaactcacgttaagggattttggtcatgagattatcaaaaaggatcttcacctagatccttttaaattaaaaatgaagttttaaatcaatctaaagtatatatgagtaaacttggtctgacagttaccaatgcttaatcagtgaggcacctatctcagcgatctgtctatttcgttcatccatagttgcctgactccccgtcgtgtagataactacgatacgggagggcttaccatctggccccagtgctgcaatgataccgcgagacccacgctcaccggctccagatttatcagcaataaaccagccagccggaagggccgagcgcagaagtggtcctgcaactttatccgcctccatccagtctattaattgttgccgggaagctagagtaagtagttcgccagttaatagtttgcgcaacgttgttgccattgctacaggcatcgtggtgtcacgctcgtcgtttggtatggcttcattcagctccggttcccaacgatcaaggcgagttacatgatcccccatgttgtgcaaaaaagcggttagctccttcggtcctccgatcgttgtcagaagtaagttggccgcagtgttatcactcatggttatggcagcactgcataattctcttactgtcatgccatccgtaagatgcttttctgtgactggtgagtactcaaccaagtcattctgagaatagtgtatgcggcgaccgagttgctcttgcccggcgtcaatacgggataataccgcgccacatagcagaactttaaaagtgctcatcattggaaaacgttcttcggggcgaaaactctcaaggatcttaccgctgttgagatccagttcgatgtaacccactcgtgcacccaactgatcttcagcatcttttactttcaccagcgtttctgggtgagcaaaaacaggaaggcaaaatgccgcaaaaaagggaataagggcgacacggaaatgttgaatactcatactcttcctttttcaatattattgaagcatttatcagggttattgtctcatgagcggatacatatttgaatgtatttagaaaaataaacaaataggggttccgcgcacatttccccgaaaagtgccacctgacgtctaagaaaccattattatcatgacattaacctataaaaataggcgtatcacgaggccctttcgtc

SEQ ID NO: 193 - DNA, 32 bp, Artificial Sequence
  Primer oGV394
caaccactgcagccagcagttaaagcaccaac

SEQ ID NO: 194 - DNA, 32 bp, Artificial Sequence
  Primer oGV395
ctcacaggatccgacgcaatgccattacactc

SEQ ID NO: 195 - DNA, 7273 bp, Artificial Sequence
  linear fragment, KM_AFT, Ll_ilvD_coSc & G418
caccagtaaaacatacgcatacacatacacacatagagcaagcaagcaggctagcaaccaggaaaggctgccagtgactgctactgggtgtctaagaaccgtagggcggattattgttgcggtggttggttgcgggtggttatgcgatggtacggtgcagaatcgtacggtgttggttatggaattagtatgggtatgtgatatgtggtaatatgtgatattgggttattgtgatttggaatactgaatatcgaatatgggatatggaatatggccatggcatggtatggtatgggatgggagtattctattttattttattttattctggttcctgcgtttagggtagggtaggaagaaggtgagtgcttttgtatataagtggagtgtctggatcagttttgtggattgtgaatgttgttagtttcccctttaatgtatatttgtattatttgcttttgagtactcaataaccaagcacaactactagttttaaaggatccatcctcttaaacagtacaatcgcaaagaaaagctccacacccaaaccaaataattgcaatggagtttaagtataacggcaaagttgaatctgttgaactgaataagtacagcaaaacgttgacacaagatcccacacaacccgccacacaggcaatgtattacggcatcgggtttaaagacgaagatttcaagaaagctcaagtgggtatagtgtcgatggactgggatggaaatccatgcaacatgcatttaggaacccttggatcaaagattaaaagctcagtaaatcagacagatggtctgatcggcttacaatttcatacgataggagtttctgatgggatagcaaatggaaagttgggaatgagatactcccttgtttccagagaagttatagctgactctattgaaaccaacgctggcgctgaatactatgatgcaattgtagccatcccaggttgtgacaaaaatatgccaggttctattattggtatggcaagacttaataggccaagcattatggtgtatggaggaacaatagaacacggtgaatataaaggtgagaaattgaacatcgtatcggcttttgaatctctaggccagaaaattaccggcaatatctctgatgaagattatcacggtgttatttgtaatgctattcctggtcaaggggcatgtggggggatgtacacagctaataccttagctgccgctatcgaaacactaggtatgtcattgccgtattcttcttcgaaccctgcagtatctcaagaaaaacaagaagaatgtgatgagattggattagccattaagaatcttttggaaaaagacatcaagcctagtgatataatgactaaggaggcgttcgagaacgctattaccattgtgatggtcttggggggtagtactaatgctgtcttgcatattattgcaatggctaacgcgataggtgtcgaaataactcaggatgacttccaaagaattagtgacattactccagtactaggtgattttaaaccttcaggtaaatatatgatggaagatttgcataaaattggaggcttgccagcagtgcttaagtaccttctaaaggaaggaaaattgcatggtgactgccttactgtgacgggtaaaacattagccgagaatgtcgagactgccctagacttggatttcgactcacaagatatcatgaggccactaaagaatcctatcaaggccaccggccacttgcagattctgtacggtaatttagctcaagggggttccgtagcaaaaattagcggtaaagaaggagagttcttcaaaggcactgccagagtctttgatggtgaacaacattttatcgacggcatagaatctggtcgtttgcatgctggagatgtagcggtaattaggaatataggtcccgtcggcggacctggtatgcccgaaatgctgaagcctacatcagcattaattggtgcgggtttagggaaaagttgcgcgttaattacggatggtagattctccggtggcactcacggttttgttgtcggccatattgtgcctgaagccgttgagggtggactaatcggcttagttgaagatgacgatataatagagatagatgcagtcaacaactctatatccctgaaagtttccgatgaagaaatcgcaaagagaagagctaattatcagaagccaactccgaaagccaccaggggagttttggcaaaattcgctaaattaacccgtcctgcatcggaagggtgtgttactgatctgtaatgtttaaagattacggatatttaacttacttagaataatgccatttttttgagttataataatcctacgttagtgtgagcgggatttaaactgtgaggaccttaatacattcagacacttctgcggtatcaccctacttattcccttcgagattatatctaggaacccatcaggttggtggaagattacccgttctaagacttttcagcttcctctattgatgttacacctggacaccccttttctggcatccagtttttaatcttcagtggcatgtgagattctccgaaattaattaaagcaatcacacaattctctcggataccacctcggttgaaactgacaggtggtttgttacgcatgctaatgcaaaggagcctatatacctttggctcggctgctgtaacagggaatataaagggcagcataatttaggagtttagtgaacttgcaacatttactattttcccttcttacgtaaatatttttctttttaattctaaatcaatctttttcaattttttgtttgtattcttttcttgcttaaatctataactacaaaaaacacatacataaactaaaaactagtatgggtaaggaaaagactcacgtttcgaggccgcgattaaattccaacatggatgctgatttatatgggtataaatgggctcgcgataatgtcgggcaatcaggtgcgacaatctatcgattgtatgggaagcccgatgcgccagagttgtttctgaaacatggcaaaggtagcgttgccaatgatgttgcagatgagatggtcagactaaactggctgacggaatttatgcctcttccgaccatcaagcattttgtccgtactcctgatgatgcatggttactcaccactgcgatccccggcaaaacagcattccaggtattagaagaatatcctgattcaggtgaaaatattgttgatgcgctggcagtgttcctgcgccggttgcattcgattcctgtttgtaattgtccttttaacagcgatcgcgtatttcgcctcgctcaggcgcaatcacgaatgaataacggtttggttgacgcgagtgattttgatgacgagcgtaatggctggcctgttgaacaagtctggaaagaaatgcataagcttttgccattctcaccggattcagtcgtcactcatggtgatttctcacttgataaccttatttttgacgaggggaaattaataggttgtattgatgttggacgagtcgggatcgcagaccgataccaggatcttgccatcctatggaactgcctcggtgagttttctccttcattacagaaacggctttttcaaaaatatggtattgataatcctgatatgaataaattgcagtttcatttgatgctcgatgagtttttctaactcaactcaagacgcacagatattataacatctgcataataggcatttgcaagaattactcgtgagtaaggaaagagtgaggaactatcgcatacctgcatttaaagatgccgatttgggcgcgaatcctttattttggcttcaccctcatactattatcagggccagaaaaaggaagtgtttccctccttcttgaattgatgttaccctcataaagcacgtggcctcttatcgagaaagaaattaccgtcgctcgtgatttgtttgcaaaaagaacaaaactgaaaaaacccagacacgctcgacttcctgtcttcctattgattgcagcttccaatttcgtcacacaacaaggtcctagcgacggctcacaggttttgtaacaagcaatcgaaggttctggaatggcgggaaagggtttagtaccacatgctatgatgcccactgtgatctccagagcaaagttcgttcgatcgtactgttactctctctctttcaaacagaattgtccgaatcgtgtgacaacaacagcctgttctcacacactcttttcttctaaccaagggggtggtttagtttagtagaacctcgtgaaacttacatttacatatatataaacttgcataaattggtcaatgcaagaaatacatatttggtcttttctaattcgtagtttttcaagttcttagatgctttctttttctcttttttacagatcatcaaggaagtaattatctactttttacaacaaatataaaacaagatggcgattaagcaagagatgggtgcgtctagcggtttggacccgctggaccctctggacccgctttcgaatgcggagttttggcacgcatctccttcttttgagatgatgaattcgccgaaggtgtcacctgcgagcactgtgatgacgcatacgcctagtgtgggcgggcagcagagtagcaacagcgaggtttcgtacaataatgttctgagtgagaatgcgatagaggcattgcagaagcaacaggaccagaacaagttgatccacttggacccgattcctgacttcaaggacaagagcgaggtgaagccgtggctccagaagatattttatccgcaggggatcgagattgtgattgagcggtcggacagcatgaagattgtgttcaagtgcaaggctgtgaagaaggcgaggagcggggttgcggctgcggcggccgcggcgtcttcgggttctggggtagcggggagttccggccacttcctagggtgtgcgtacgtgggcatgaacacgaatccgatgttgaataagggttcgagtaagaagaaggatggcagcggtaataatgccaggtgcaaggacgagaagtgcggcggcgatgggtcgtgtgaaaatagcggcgctaacgtcgacgctaatgctgcggaaaatgctaatgctagtaatagtaccacatccacgggcaaaaagaagagggtcactggtccatacaactcgtgtcccttcagagtgcgagctactttctcgttgaaaaggaagaagtggaacatcgtggtgattaacaacgtgcacacccacccgctacggttcaatcccgacagcgaggactacaaaaaatttaaaaagggtctatacgacagcggcgatatcgagacggtcaagaaattcgacgagctcgaatacagaactaaatcgaacctgcctatcgatttgagccctatcccatgtgactgtggtctaacacaggaaatccagtcctttaatatcgtccttccaacaacaaacattatagcatcaaccagcagagctggttcttctgatgcaaacactgtgtcaaagccaaagaagtgtaaaaactctttgaagaagaaatcaaaaaaattgaggctaaagaatacaaaacaaaagttgcaacaggatatcgaaagcaacagcgctcatacttccgctacaggaacgccattaggaaatgtaccaaatacactgaacctccaatttgacgtcaacatggacttgggtgtacagtccacttctggatcaaatatgaattcaagcgtggtattaacccctcaagaaaacatatattcgcatgatttcttccccaacacagcttcatcgcaacgtaatgactcaccaaacttttcaaatctaaacccaagctactttaacactgagaatgaaattgacttcacggagctatttagcaaaccattacctcatttcaaaaacaatcagcaacctgtaccccaatcacaggatgctattccactctcgttttctcataaaccatcaaacagtggtattccggacacccatcattctcaggcccaaggcaggcatatgttataccagaacgttgattctacaccatctactcattcatcacctagtatgaatgtaatgaccacaggaaagaattctatgacaatcacaccagctcttaacacagctacagcagcaacaggacccactcagagttccgtgccattgtactcatcggatatatctaaggaacaaattcaagatttcgttgacatgaatcaaattttcggcacctccgaatattctaaagaccgtaattctaactcaaataccccgaactctgtgatcccaggacggtcattaaactttcaacattctagattaccaacttcaaatcaacatcagaatcaaagtgctatttgtgaaataaataactatgatgtctgtgcaaatgactttggacaatgtggcggtgtcggcgctggtgtcgaaaccaattcacatagtaatactaacagtattactttgacgactagttctatgggtaatggtatcaactcgagcgtccatggttatgatattccaattaaaacagagttaacttcaaacccacaggagtatatctctaatgtactgaatacggattttaacgaacttaaactttcccaagatgaacaacatcagcaacaaggtggcatgaacaacctcggttctcaatcaaattacaactaccagttaatgttcgatgaggagttaaatcaacctcaacaaacaacgcataaccctcacaccctgtgggaagaacctcatggattccttcagtgacatatagatgaaatcaaacttagacgtatctctcgtccattttcattacattttcatctttcttcattaattatatactgaacatatacgcatctatacaattttgactttttaaagaagaaaaagaaaacaatagtatacattcttttttctacttttgttacagataaaaaatcgttcttattatattacatatatcggtgctaagatcaggattttttcatgttccttccccctgttatttcacatcatccttttgccggtagattaggctggtgtaaatagtagtgcttttctcatacatacaagacatacgtgaagataagtcccattttctctccctctgtcattaattttgaaagttcgttgagcactcatgaaaactgcgtccttttgtttttttgatctgaagtaaatatgtgtgagcaagataagcacacaaagaataaaaccatcgaagtatcctttcttctttgttgtgattgaaaaaacacattttcccgagagtgacatttgggacattctct

SEQ ID NO: 196 - DNA, 4436 bp, Artificial Sequence
  linear fragment, Ll_ilvD_coSc &G418
caccagtaaaacatacgcatacacatacacacatagagcaagcaagcaggctagcaaccaggaaaggctgccagtgactgctactgggtgtctaagaaccgtagggcggattattgttgcggtggttggttgcgggtggttatgcgatggtacggtgcagaatcgtacggtgttggttatggaattagtatgggtatgtgatatgtggtaatatgtgatattgggttattgtgatttggaatactgaatatcgaatatgggatatggaatatggccatggcatggtatggtatgggatgggagtattctattttattttattttattctggttcctgcgtttagggtagggtaggaagaaggtgagtgcttttgtatataagtggagtgtctggatcagttttgtggattgtgaatgttgttagtttcccctttaatgtatatttgtattatttgcttttgagtactcaataaccaagcacaactactagttttaaaggatccatcctcttaaacagtacaatcgcaaagaaaagctccacacccaaaccaaataattgcaatggagtttaagtataacggcaaagttgaatctgttgaactgaataagtacagcaaaacgttgacacaagatcccacacaacccgccacacaggcaatgtattacggcatcgggtttaaagacgaagatttcaagaaagctcaagtgggtatagtgtcgatggactgggatggaaatccatgcaacatgcatttaggaacccttggatcaaagattaaaagctcagtaaatcagacagatggtctgatcggcttacaatttcatacgataggagtttctgatgggatagcaaatggaaagttgggaatgagatactcccttgtttccagagaagttatagctgactctattgaaaccaacgctggcgctgaatactatgatgcaattgtagccatcccaggttgtgacaaaaatatgccaggttctattattggtatggcaagacttaataggccaagcattatggtgtatggaggaacaatagaacacggtgaatataaaggtgagaaattgaacatcgtatcggcttttgaatctctaggccagaaaattaccggcaatatctctgatgaagattatcacggtgttatttgtaatgctattcctggtcaaggggcatgtggggggatgtacacagctaataccttagctgccgctatcgaaacactaggtatgtcattgccgtattcttcttcgaaccctgcagtatctcaagaaaaacaagaagaatgtgatgagattggattagccattaagaatcttttggaaaaagacatcaagcctagtgatataatgactaaggaggcgttcgagaacgctattaccattgtgatggtcttggggggtagtactaatgctgtcttgcatattattgcaatggctaacgcgataggtgtcgaaataactcaggatgacttccaaagaattagtgacattactccagtactaggtgattttaaaccttcaggtaaatatatgatggaagatttgcataaaattggaggcttgccagcagtgcttaagtaccttctaaaggaaggaaaattgcatggtgactgccttactgtgacgggtaaaacattagccgagaatgtcgagactgccctagacttggatttcgactcacaagatatcatgaggccactaaagaatcctatcaaggccaccggccacttgcagattctgtacggtaatttagctcaagggggttccgtagcaaaaattagcggtaaagaaggagagttcttcaaaggcactgccagagtctttgatggtgaacaacattttatcgacggcatagaatctggtcgtttgcatgctggagatgtagcggtaattaggaatataggtcccgtcggcggacctggtatgcccgaaatgctgaagcctacatcagcattaattggtgcgggtttagggaaaagttgcgcgttaattacggatggtagattctccggtggcactcacggttttgttgtcggccatattgtgcctgaagccgttgagggtggactaatcggcttagttgaagatgacgatataatagagatagatgcagtcaacaactctatatccctgaaagtttccgatgaagaaatcgcaaagagaagagctaattatcagaagccaactccgaaagccaccaggggagttttggcaaaattcgctaaattaacccgtcctgcatcggaagggtgtgttactgatctgtaatgtttaaagattacggatatttaacttacttagaataatgccatttttttgagttataataatcctacgttagtgtgagcgggatttaaactgtgaggaccttaatacattcagacacttctgcggtatcaccctacttattcccttcgagattatatctaggaacccatcaggttggtggaagattacccgttctaagacttttcagcttcctctattgatgttacacctggacaccccttttctggcatccagtttttaatcttcagtggcatgtgagattctccgaaattaattaaagcaatcacacaattctctcggataccacctcggttgaaactgacaggtggtttgttacgcatgctaatgcaaaggagcctatatacctttggctcggctgctgtaacagggaatataaagggcagcataatttaggagtttagtgaacttgcaacatttactattttcccttcttacgtaaatatttttctttttaattctaaatcaatctttttcaattttttgtttgtattcttttcttgcttaaatctataactacaaaaaacacatacataaactaaaaactagtatgggtaaggaaaagactcacgtttcgaggccgcgattaaattccaacatggatgctgatttatatgggtataaatgggctcgcgataatgtcgggcaatcaggtgcgacaatctatcgattgtatgggaagcccgatgcgccagagttgtttctgaaacatggcaaaggtagcgttgccaatgatgttgcagatgagatggtcagactaaactggctgacggaatttatgcctcttccgaccatcaagcattttgtccgtactcctgatgatgcatggttactcaccactgcgatccccggcaaaacagcattccaggtattagaagaatatcctgattcaggtgaaaatattgttgatgcgctggcagtgttcctgcgccggttgcattcgattcctgtttgtaattgtccttttaacagcgatcgcgtatttcgcctcgctcaggcgcaatcacgaatgaataacggtttggttgacgcgagtgattttgatgacgagcgtaatggctggcctgttgaacaagtctggaaagaaatgcataagcttttgccattctcaccggattcagtcgtcactcatggtgatttctcacttgataaccttatttttgacgaggggaaattaataggttgtattgatgttggacgagtcgggatcgcagaccgataccaggatcttgccatcctatggaactgcctcggtgagttttctccttcattacagaaacggctttttcaaaaatatggtattgataatcctgatatgaataaattgcagtttcatttgatgctcgatgagtttttctaactcaactcaagacgcacagatattataacatctgcataataggcatttgcaagaattactcgtgagtaaggaaagagtgaggaactatcgcatacctgcatttaaagatgccgatttgggcgcgaatcctttattttggcttcaccctcatactattatcagggccagaaaaaggaagtgtttccctccttcttgaattgatgttaccctcataaagcacgtggcctcttatcgagaaagaaattaccgtcgctcgtgatttgtttgcaaaaagaacaaaactgaaaaaacccagacacgctcgacttcctgtcttcctattgattgcagcttccaatttcgtcacacaacaaggtcctagcgacggctcacaggttttgtaacaagcaatcgaaggttctggaatggcgggaaagggtttagtaccacatgctatgatgcccactgtgatctccagagcaaagttcgttcgatcgtactgttactctctctctttcaaacagaattgtccgaatcgtgtgacaacaacagcctgttctcacacactcttttcttctaaccaagggggtggtttagtttagtagaacctcgtgaaacttacatttacatatatataaacttgcataaattggtcaatgcaagaaatacatatttggtcttttctaattcgtagtttttcaagttcttagatgctttctttttctcttttttacagatcatcaaggaagtaattatctactttttacaacaaatataaaacaag

SEQ ID NO: 197 - DNA, 24 bp, Artificial Sequence
  Primer pGK1F
aatgcaagaaatacatatttggtc

SEQ ID NO: 198 - DNA, 20 bp, Artificial Sequence
  Primer KmAFTR
gaaacctcgctgttgctact

SEQ ID NO: 199 - DNA, 21 bp, Artificial Sequence
  Primer oGV2107
cgttgacacaagatcccacac

SEQ ID NO: 200 - DNA, 22 bp, Artificial Sequence
  Primer oGV2108
ccatcgacactatacccacttg

SEQ ID NO: 201 - DNA, 5036 bp, Artificial Sequence
  linear fragment, KL_AFT & G418
cccggagacggtcacagcttgtctgtaagcggatgccgggagcagacaagcccgtcagggcgcgtcagcgggtgttggcgggtgtcggggctggcttaactatgcggcatcagagcagattgtactgagagtgcaccataccacagcttttcaattcaattcatcattttttttttattcttttttttgatttcggtttctttgaaatttttttgattcggtaatctccgaacagaaggaagaacgaaggaaggagcacagacttagattggtatatatacgcatatggcaaattaaagccttcgagcgtcccaaaaccttctcaagcaaggttttcagtataatgttacatgcgtacacgcgtctgtacagaaaaaaaagaaaaatttgaaatataaataacgttcttaatactaacataactataaaaaaataaatagggacctagacttcaggttgtctaactccttccttttcggttagagcggatgtggggggagggcgtgaatgtaagcgtgacataactaattacatgactcgacctaggtcattgaaaaaagccgtgaggttcatcccaaagcatttgtggattatgcgtagcttgctgcggttggtcaagatcattattaaactgtaggtgataattgtactccgaattcgcaacgagctcttcaatctcttcctctttcaaaggtaaaatctcatgtagagggttgtgctgatcatgaagttgttgctgttgctgttgctgttgcatttgctgttgctgttgattttgcatctgatgctggtggcggcgttgctgctgcatatgttgttgatggtgttgctctccttgattatgttgactttgtgataatcgcagttcgttgaagtcagagtttaatacattagaaatgtattcctgtgattgagcatcataatctggctttgtatgcagaggatccatgtagcccgtcgcatcgtttgattggctgataccattagcgatctccatgtttgaacgatctatattgagtccatgaataccagtagcagtaccaatgagaggaccaccacattgagggtcattagcacatacgtcaaagttgttaatttcgcatactgcactaatgttctgatttactggcgatagattggaatgttggaaatttagtgaatgcgaaggtatcatggcattagcatgactagtattatgttgttgatgaagatggttattattagtattaacggatgaagtattagcattagaatggtcattattattggttgaagtaccaaatatttggttcatgtcaatgaaatcttgtataggctccttggccaagttggacgaataaagtggcacagaactgatcgcgttcatattgtgagagtttgtactgggagtagccgttgtaatgggagtctttacagacgtcattatactcatatttggggacgaatgcgtagaagatgcagaaccagcattatggtacattagattactgttgatgttttggtgaggggtatgttgagcactttgagaactcgtttggtgtttctgggaaaatgtaagtggaatcatgccttggcctgtaaccacatcatgtcgattatttttgaagtgaggcaaaggtttactgaagaactccgtgaagtcaatttcattttgcacgttgaaatagttcgagttgaagtttgagaagttaggtgaatccatctgttgcgaagaagcagtattcggcaagaaatcagttgagtaaatattctcttgaggcgttagggccaagtttgaattcaggttagaagtcacagatggagctactgaaacatttgattgggaatcgaactgtaaattcaacgaattctgcacagtacttagcggagttgctgttctcgaagtgtttgcactattgctctctatatcttgttgtaactttttctttgtgcttttacgtctcagctgttttgtagtcttactcttgacagcttttttaccggtcttctttggttttgttactgtattggcatccatggaagtattccttgacccaggtacgatgatatttgttgtaggcaaaacgatattgaaggattgaatttcctgagtaagaccacaatcacaggggatgggactaagatcaatgggcaagttaaaccttgttctgtactccaattcatcgaactttttaacggtttcaaggtctccgctttcctttagagcattcttaaactttttataatcttcactatcggggttaaacttcaacggatgggtgtgtacgttattgacaacgacgatgttccacttctttctcttcaaagagaacgtggctcgcactctgaagggacatgaattgtacggtccgatggcacgtttcttcttgtctgtatcgttactaccatttccaccaccgacagtactgttactattattaccgttttctgtctctgtttcaagaccatcacattcggcaaaacccttcccgattccctttttcctacacttattatcattactaccattacccttagtactgttcttcccattagtgttacaactatcgctaccaacgccgtggctgtgaccacacccggatatagacgaagtatttctattctttttaacagctttacatttgaacacgatcttcatgctatccgaccgttcaatgacgatctcaatcccctgtggataaaaaatcttctgtaaccacggtttaacttcactcttatctttgaagtcagggatcggatccaaatgaatcaatttattctggtcttgctgtctccgaagagcttctatcgcgttttcactcaacgcattgttataagagacttcgctattattactcgaggataaattcgagccaacatggtgagccgccggtgtatgggacagtccagaaccgatgggcgaagtcttcggcgaagccatcatattgtcaaaagatggagaaggctgccataaatccggattatgaagaggatccaagggatccactccttcaataggtgtctgtagctcgtgcttcatggtacctattattgtatgttatagtattagttgcttggtgttatgaaagaaactaagaaaagaaaaataaaataaaaataaaagattgagacaagggaagaaaagatacaaaataagaattaattacaattgcgtttgctataaatacgtttttaacaatcaactctggtaggaagataatgctttttttttttatatatgcttggtgccacttgtcacatacaattctacaaccttcgacaaaaatccaaatgatagtaagatcaaagccagaaagcaatggagaaaaaaaattaatgaaccacgatgaaccaaatgatcaatacaaccaaagaaactaccctagtgaggtgtatgctgacttggtatcacacttcatgaattttgcatatggcaaagtccacgaaagtgggcttcagaaaaaaggcgtgcggtgtgtagatgtatcaattagtggatgccagttttggaacgggattccactttccgcaagttggtgcacgtcgttagtgacataacgccgcgttcatctttgggaagaagcagatgctgagcgaggaggtactatagagtaaagaaccctttctatacccgcagccccatgaattcttagaaaaactcatcgagcatcaaatgaaactgcaatttattcatatcaggattatcaataccatatttttgaaaaagccgtttctgtaatgaaggagaaaactcaccgaggcagttccataggatggcaagatcctggtatcggtctgcgatcccgactcgtccaacatcaatacaacctattaatttcccctcgtcaaaaataaggttatcaagtgagaaatcaccatgagtgacgactgaatccggtgagaatggcaaaagcttatgcatttctttccagacttgttcaacaggccagccattacgctcgtcatcaaaatcactcgcgtcaaccaaaccgttattcattcgtgattgcgcctgagcgaggcgaaatacgcgatcgctgttaaaaggacaattacaaacaggaatcgaatgcaaccggcgcaggaacactgccagcgcatcaacaatattttcacctgaatcaggatattcttctaatacctggaatgctgttttgccggggatcgcagtggtgagtaaccatgcatcatcaggagtacggacaaaatgcttgatggtcggaagaggcataaattccgtcagccagtttagtctgaccatctcatctgcaacatcattggcaacgctacctttgccatgtttcagaaacaactctggcgcatcgggcttcccatacaatcgatagattgtcgcacctgattgcccgacattatcgcgagcccatttatacccatataaatcagcatccatgttggaatttaatcgcggcctcgaaacgtgagtcttttccttacccatactagtttttagtttatgtatgtgttttttgtagttatagatttaagcaagaaaagaatacaaacaaaaaattgaaaaagattgatttagaattaaaaagaaaaatatttacgtaagaagggaaaatagtaaatgttgcaagttcactaaactcctaaattatgctgccctttatattccctgttacagcagccgagccaaaggtatataggctcctttgcattagcatgcgtaacaaaccacctgtcagtttcaaccgaggtggtatccgagagaattgtgtgattgctttaattaatttcggagaatctcacatgccactgaagattaaaaactggatgccagaaaaggggtgtccaggtgtaacatcaatagaggaagctgaaaagtcttagaacgggtaatcttccaccaacctgatgggttcctagatataatctcgaagggaataagtagggtgataccgcagaagtgtctgaatgtattaaggtcctcacagtttaaatcccgctcacactaacgtaggattattataactcaaaaaaatggcattattctaagtaagttaaatatccgtaatctttaaacagcggccgca

SEQ ID NO: 202 - DNA, 1950 bp, Saccharomyces cerevisiae
atgccagtggaggagcctcttgctacactttcatcaattccagattctagcgcggaccaggccccaccgttaatagcagatgaatttacgttagacctgcccagaattccaagtttagaattgccacttaatgtctccacaaaacactctagtatacagaaggctataaaaatgtgtgggggcatcgaaaaagtgaaagaagcctttaaagaacatggacctatcgaatctcagcacggattacaactgtacttaaacgatgatactgatagcgacggatccaagagctattttaatgagcatcctgtaattggtaaaagagttcccttcagagatgagtcggtcatattaaaggttacaatgcctaagggaactttaagtaaaaataataatagcgtcaaagattctatcaaatccttaaaagattcgaataaattgagagtcactcctgtttccatagtagataacactataaaatttagagaaatgtcagattttcaaatcaaactggataatgtcccctctgcaagagagttcaaaagtagctttggctctctggaatggaataatttcaaaagttttgtcaattctgtaccagataatgactctcaacctcaggaaaacatcgggaatttgatcttagaccgtagcgttaaaattccgagtacagatttccaactgccgccacctcctaagttatcaatggttggtttccccctgctttataaatataaagctaatccatttgcgaaaaaaaaaaaaaacggtgtcacagaagtgaagggaacatatatcaaaaactatcagttgtttgttcatgatcttagtgataagacagttataccgtcccaagctcatgaacaagtcctgtacgattttgaggtcgcgaagaaaacaaaagtctatccaggcactaaaagtgactctaaattttatgaatcgctggaggaatgcttgaaaattttgagagagctcttcgctagacgtccaatttgggttaaaagacatcttgatgggattgtcccgaagaagatacaccatactatgaagatagcgctggcactcatatcttatcgtttcacaatggggccttggagaaatacatatatcaaatttggtatagaccccagaagttcagtggaatacgcccaatatcaaacagaatattttaagattgaaaggaaattactatcttctcccatagtgaaaaagaatgtaccaaagccaccacccctggtattcgaatcagacactccaggcggtattgacagcaggttcaaatttgatggaaaaagaataccgtggtacctgatgttgcagattgatttattaattggtgagccaaacattgcagaagtttttcacaacgtcgaatatttagataaggcgaatgaactaactggatggttcaaagaattagacttggtcaagataagaaggatagtaaaatacgaacttggttgcatggttcaaggaaattatgagtataataaatacaagttgaagtatttcaagacaatgttatttgttaaagaatccatggtacccgaaaacaagaactcagaagagggaatgggtgttaacaccaataaagatgctgatggggacataaatatggatgcaggtagtcaaatgtcctcaaatgccatagaggaggataagggtatcgctgctggtgatgattttgatgataatggcgccataactgaagagccagacgacgctgctttggaaaatgaagagatggacactgatcagaacttgaaggtgcctgcaagtatagacgatgacgtggatgacgttgatgcagatgaagaagaacaagaaagttttgatgttaaaacagcgagcttccaagatatcataaataaaatagctaaactagatcctaaaaccgcggaaacaatgaaaagcgagctcaagggatttgttgatgaagtcgatctgtaa

SEQ ID NO: 203 - protein, 649 aa, Saccharomyces cerevisiae
MPVEEPLATLSSIPDSSADQAPPLIADEFTLDLPRIPSLELPLNVSTKHSSIQKAIKMCGGIEKVKEAFKEHGPIESQHGLQLYLNDDTDSDGSKSYFNEHPVIGKRVPFRDESVILKVTMPKGTLSKNNNSVKDSIKSLKDSNKLRVTPVSIVDNTIKFREMSDFQIKLDNVPSAREFKSSFGSLEWNNFKSFVNSVPDNDSQPQENIGNLILDRSVKIPSTDFQLPPPPKLSMVGFPLLYKYKANPFAKKKKNGVTEVKGTYIKNYQLFVHDLSDKTVIPSQAHEQVLYDFEVAKKTKVYPGTKSDSKFYESLEECLKILRELFARRPIWVKRHLDGIVPKKIHHTMKIALALISYRFTMGPWRNTYIKFGIDPRSSVEYAQYQTEYFKIERKLLSSPIVKKNVPKPPPLVFESDTPGGIDSRFKFDGKRIPWYLMLQIDLLIGEPNIAEVFHNVEYLDKANELTGWFKELDLVKIRRIVKYELGCMVQGNYEYNKYKLKYFKTMLFVKESMVPENKNSEEGMGVNTNKDADGDINMDAGSQMSSNAIEEDKGIAAGDDFDDNGAITEEPDDAALENEEMDTDQNLKVPASIDDDVDDVDADEEEQESFDVKTASFQDIINKIAKLDPKTAETMKSELKGFVDEVDL

SEQ ID NO: 204 - DNA, 1713 bp, Lactococcus lactis
atggaattcaaatacaatggtaaagttgaatccgttgaacttaacaaatactccaagactttaacccaagatccaactcaaccagccactcaggccatgtattacggtattggtttcaaagacgaagatttcaaaaaggctcaagttggtattgtgtcaatggactgggatggtaatccatgtaacatgcacttgggtactttaggttccaagattaagtcctccgttaaccagaccgacggtctaataggtttgcaatttcataccattggtgtttccgacggtattgcaaatggcaaattgggtatgagatattctcttgtttcaagagaagttatcgctgattcaatcgaaacaaatgctggtgcagaatactatgatgcaatcgttgcaattcctggttgtgacaaaaacatgccaggttccattatcggtatggctagattgaatagaccatccattatggtttatggtggtacgattgaacacggagagtataagggtgagaagttaaacattgtttctgctttcgaatcactcggtcaaaagattacaggcaacatttctgatgaagattatcacggcgttatctgtaacgctatccctggacaaggtgcttgtggtggcatgtacactgcaaacactttagcagcagctatcgaaactctaggtatgtctttaccatattcctcctctaacccagcagtttctcaagagaaacaggaagagtgtgacgaaattggtttggcgatcaaaaacttgttagaaaaagatatcaaaccatctgacattatgaccaaagaggctttcgaaaatgccataactattgttatggttttgggtggttcaaccaatgctgttttacacattatcgcaatggcaaacgctattggagttgaaatcacacaagatgatttccaaaggattagtgatatcactccagttttaggcgatttcaaaccaagtggaaagtacatgatggaagatttgcacaagattggtggtctaccagctgttttgaagtatctccttaaggaaggcaaattgcatggtgactgcttaaccgttaccggaaaaaccttagcagagaatgttgaaacggcattagatttggactttgattctcaagatatcatgcgtcctttgaaaaacccaatcaaggctactggtcatctccaaatcttatacggtaatctagctcaaggtggatccgttgctaagattagtggtaaagagggcgagtttttcaagggtacagccagggtttttgatggtgaacaacactttatcgatggtatcgaatctggtagattgcatgcaggcgatgttgctgttatcagaaacattggtccagttggtggcccaggcatgcctgaaatgttaaagccaacttctgctttgattggtgccggtttaggaaaatcatgcgctcttatcaccgatggtagattttctggcggtacacatggttttgttgttggtcatattgttccagaagcagttgaaggtggtcttatcggtttagtggaagatgacgacattatcgaaattgatgcagtgaataactctatttccttgaaagtttccgatgaagagattgctaaacgtagagcaaactaccaaaaacctactccaaaagcgaccagaggtgttttagcaaagttcgccaaattgaccagaccagcgtctgaaggttgtgttactgacttgtaa

SEQ ID NO: 205 - protein, 570 aa, Lactococcus lactis; identical to SEQ ID NO: 49

SEQ ID NO: 206 - DNA, 1713 bp, Lactococcus lactis
atggagtttaagtacaacggcaaagtcgaatctgttgaattgaacaaatactctaagactctaactcaagatccaactcaaccagctactcaagcaatgtattatggtattggcttcaaggatgaggatttcaaaaaggcacaagtcggtattgtaagcatggattgggatggaaatccatgtaacatgcatctaggaacacttggtagcaagataaagtccagtgtgaaccaaactgatggtctaattggactacaattccataccatcggtgtttccgatggaattgcaaacggtaagcttggcatgagatactctttagtgagcagagaagttattgcagattccattgagacaaatgctggtgctgaatactacgacgcaatcgtggcaattccaggatgcgacaaaaacatgcctggttcaattatcggtatggcacgtttgaacagaccatcaattatggtttacggaggtacaatagaacatggtgaatacaaaggtgaaaagttgaacattgtttctgcatttgagtctttgggccaaaagattacaggtaacatttctgatgaagattatcatggagtcatatgcaatgcaattcctggccaaggtgcttgtggtggaatgtacacagctaacacattagctgctgcaatcgaaacattaggcatgtcattgccttacagctcttccaacccagctgtatcccaggaaaaacaggaagagtgtgatgaaatcggtttagcaatcaaaaacttattagaaaaggacattaagccttccgacataatgactaaggaagcttttgaaaatgctatcacaatagtgatggtccttggtggctctaccaacgcagttttacacatcattgcaatggcaaatgcaataggagttgaaatcacacaagatgattttcaacgtatctccgatatcacacctgtcctaggcgatttcaaaccatctggcaagtatatgatggaggatctacacaagattggaggacttcctgcagtcttaaagtatttgttgaaagagggtaaattgcatggtgattgtttaaccgtcactggcaagaccttggcagaaaatgtagaaactgctttggatttggatttcgatagtcaagatatcatgaggccattgaaaaaccctatcaaggctactggtcacttacaaatcttatacggcaatctagcacaaggtggttctgtcgctaagattagtggtaaggaaggagagtttttcaagggtacagcaagagtttttgatggtgaacaacactttatcgatggcatagaaagtggtagattgcatgcaggcgatgtggctgtaattagaaacattggaccagttggcggacctggtatgcctgaaatgctaaagcctacttccgcactaattggagctggtcttggtaaatcatgtgctttaatcaccgatggtagattctccggtggcacacatggttttgtagttggccatatcgtaccagaagctgttgaaggaggtcttataggcttagtagaagatgatgacataatcgaaatagacgcagtgaacaatagcatctcactaaaagtttctgatgaggaaatagcaaagagaagggctaattaccagaagccaactccaaaggcaaccagaggtgttctagctaagtttgctaagttaactagacctgctagcgaaggatgtgttacagacttatga

SEQ ID NO: 207 - protein, 570 aa, Lactococcus lactis; identical to SEQ ID NO: 49

SEQ ID NO: 208 - DNA, 2073 bp, Saccharomyces cerevisiae; identical to SEQ ID NO: 1

SEQ ID NO: 209 - protein, 690 aa, Saccharomyces cerevisiae; identical to SEQ ID NO: 2

SEQ ID NO: 210 - DNA, 2073 bp, Saccharomyces cerevisiae
atggaaggcttcaatccggctcacatagaacatgcgtcaccgattaattcatctgacagccattcatcctcctttgtatatgctctacccaaaagtgctagtgaatatgtagtcaaccataatgagggtcgtgcaagtgcaagtggaaatccagccgcagtgccgtctcccataatgacactgaatctcaaaagcacacattccctcaatagtgatcagcatgttcatacctcaacatcgccgacggaaactattgggcatattcatcatgtggaaaagctgaatcaaaacaatttgattcatctggatccagtacccaactttgaagataagtccgatattaagccttggttgcaaaagattttttatcctcaaggaatagaacttgtgatagaaaggtcggacacatttaaagttgtcttcaagtgtaaagctgctaaaaggggaaggaacgcgagaaggaaaagaaaagataagcccaaaggacaggaccacgaagacgagaaatccaagatcaatgatgacgaattagaatatgcgagtccttctaatgccacagtaaccaatgggcctcaaacatcgcccgatcaaacatcctccataaagccaaagaaaaaaagatgtgtatcgaggtttaataactgtccgtttagagtacgagctacttattcgttaaagaggaaaagatggagcattgttgtaatgaacaataaccattcacatcagctaaagtttaaccctgattccgaagagtacaaaaaattcaaagaaaaattaagaaaggataatgacgtagatgcaatcaagaaattcgacgaattggaatacagaactttggccaatttgcccattccaacagctacaatcccctgtgattgtggtttaacaaatgaaatacaaagtttcaatgtcgtattgcccactaacagtaatgttacttcatcagcatcctcttcaactgtatcgtccatatcccttgattcatcgaatgcatctaaaaggccatgcttaccctctgtaaataacaccggtagtatcaataccaataacgtaaggaaaccgaaaagccagtgtaagaataaagacacactcttaaaaagaaccaccatgcagaactttctcacaactaaatcaaggctgcgtaagaccggtacgccaacatcttcgcaacactcatctacagcattttcaggatatattgatgatcctttcaatttgaatgaaatcttgccactgccggcatccgatttcaagctaaacactgtaacaaatttgaacgaaattgactttacgaacatttttaccaaatcgccgcatccacatagcgggtctacccatccaagacaagtcttcgaccaattggacgattgttcctctatactcttctctccattaactacaaacacgaataatgaatttgaaggagagtcagatgattttgttcattctccatatttgaactcagaggcagatttcagccaaattcttagtagtgctcccccagtccatcatgacccaaatgaaacacatcaggaaaaccaggatattattgatagatttgctaatagttcccaagaacataatgagtatattctacaatatttgacgcacttcgatgctgctaaccacaataacatcggcgttccaaacaacaattcacattcgctaaatactcagcataacgtttctgatctgggcaacccacttttaagacaagaagctttagttggcagctcttcaacaaaaatcttcgacgaattgaaatttgtacaaaatggcccacacggttctcaacatcctatagattttcaacatgttgaccatcgtcatctcagctctaatgaacctcaagtacgatcacatcaatatggtccgcaacagcagccaccgcagcaattgcaatatcaccaaaatcagccccacgacggccataaccacgaacagcaccaaacagtacaaaaggatatgcaaacgcatgaatcgctagaaataatgggaaacacattattggaagagttcaaagacattaaaatggtgaacggcgagttgaagtatgtgaagccagaagattag

SEQ ID NO: 211 - protein, 690 aa, Saccharomyces cerevisiae
MEGFNPAHIEHASPINSSDSHSSSFVYALPKSASEYVVNHNEGRASASGNPAAVPSPIMTLNLKSTHSLNSDQHVHTSTSPTETIGHIHHVEKLNQNNLIHLDPVPNFEDKSDIKPWLQKIFYPQGIELVIERSDTFKVVFKCKAAKRGRNARRKRKDKPKGQDHEDEKSKINDDELEYASPSNATVTNGPQTSPDQTSSIKPKKKRCVSRFNNCPFRVRATYSLKRKRWSIVVMNNNHSHQLKFNPDSEEYKKFKEKLRKDNDVDAIKKFDELEYRTLANLPIPTATIPCDCGLTNEIQSFNVVLPTNSNVTSSASSSTVSSISLDSSNASKRPCLPSVNNTGSINTNNVRKPKSQCKNKDTLLKRTTMQNFLTTKSRLRKTGTPTSSQHSSTAFSGYIDDPFNLNEILPLPASDFKLNTVTNLNEIDFTNIFTKSPHPHSGSTHPRQVFDQLDDCSSILFSPLTTNTNNEFEGESDDFVHSPYLNSEADFSQILSSAPPVHHDPNETHQENQDIIDRFANSSQEHNEYILQYLTHFDAANHNNIGVPNNNSHSLNTQHNVSDLGNPLLRQEALVGSSSTKIFDELKFVQNGPHGSQHPIDFQHVDHRHLSSNEPQVRSHQYGPQQQPPQQLQYHQNQPHDGHNHEQHQTVQKDMQTHESLEIMGNTLLEEFKDIKMVNGELKYVKPED

SEQ ID NO: 212 - DNA, 2073 bp, Saccharomyces cerevisiae; identical to SEQ ID NO: 210

SEQ ID NO: 213 - protein, 690 aa, Saccharomyces cerevisiae; identical to SEQ ID NO: 211

SEQ ID NO: 214 - DNA, 2073 bp, Saccharomyces cerevisiae; identical to SEQ ID NO: 210

SEQ ID NO: 215 - protein, 690 aa, Saccharomyces cerevisiae; identical to SEQ ID NO: 211

SEQ ID NO: 216 - DNA, 2073 bp, Saccharomyces cerevisiae; identical to SEQ ID NO: 210

SEQ ID NO: 217 - protein, 690 aa, Saccharomyces cerevisiae; identical to SEQ ID NO: 211

SEQ ID NO: 218 - DNA, 2073 bp, Saccharomyces cerevisiae
atggaaggcttcaatccggctcacatagaacatgcgtcaccgattaattcatctgacagccattcatcctcctttgtatatggtctacccaaaagtgctagtgaatatgtagtcaaccataatgagggtcgtgcaagtgcaagtggaaatccagccgcagtgccgtctcccataatgacactgaatctcaaaagcacacattccctcaatagtgatcagcatgttcatacctcaacatcgccgacggaaactattgggcatattcatcatgtggaaaagctgaatcaaaacaatttgattcatctggatccagtacccaactttgaagataagtccgatattaagccttggttgcaaaagattttttatcctcaaggaatagaacttgtgatagaaaggtcggacacatttaaagttgtcttcaagtgtaaagctgctaaaaggggaaggaacgcgagaaggaaaagaaaagataagcccaaaggacaggaccacgaagacgagaaatccaagatcaatgatgacgaattagaatatgcgagtccttctaatgccacagtaaccaatgggcctcaaacatcgcccgatcaaacatcctccataaagccaaagaaaaaaagatgtgtatcgaggtttaataactgtccgtttagagtacgagctacttattcgttaaagaggaaaagatggagcattgttgtaatgaacaataaccattcacatcagctaaagtttaaccctgattccgaagagtacaaaaaattcaaagaaaaattaagaaaggataatgacgtagatgcaatcaagaaattcgacgaattggaatacagaactttggccaatttgcccattccaacagctacaatcccctgtgattgtggtttaacaaatgaaatacaaagtttcaatgtcgtattgcccactaacagtaatgttacttcatcagcatcctcttcaactgtatcgtccatatcccttgattcatcgaatgcatctaaaaggccatgcttaccctctgtaaataacaccggtagtatcaataccaataacgtaaggaaaccgaaaagccagtgtaagaataaagacacactcttaaaaagaaccaccatgcagaactttctcacaactaaatcaaggctgcgtaagaccggtacgccaacatcttcgcaacactcatctacagcattttcaggatatattgatgatcctttcaatttgaatgaaatcttgccactgccggcatccgatttcaagctaaacactgtaacaaatttgaacgaaattgactttacgaacatttttaccaaatcgccgcatccacatagcgggtctacccatccaagacaagtcttcgaccaattggacgattgttcctctatactcttctctccattaactacaaacacgaataatgaatttgaaggagagtcagatgattttgttcattctccatatttgaactcagaggcagatttcagccaaattcttagtagtgctcccccagtccatcatgacccaaatgaaacacatcaggaaaacctggatattattgatagatttgctaatagttcccaagaacataatgagtatattctacaatatttgacgcacttcgatgctgctaaccacaataacatcggcgttccaaacaacaattcacattcgctaaatactcagcataacgtttctgatctgggcaacccacttttaagacaagaagctttagttggcagctcttcaacaaaaatcttcgacgaattgaaatttgtacaaaatggcccacacggttctcaacatcctatagattttcaacatgttgaccatcgtcatctcagctctaatgaacctcaagtacgatcacatcaatatggtccgcaacagcagccaccgcagcaattgcaatatcaccaaaatcagccccacgacggccataaccacgaacagcaccaaacagtacaaaaggatatgcaaacgcatgaatcgctagaaataatgggaaacacattattggaagagttcaaagacattaaaatggtgaacggcgagttgaagtatgtgaagccagaagattag

SEQ ID NO: 219 - protein, 690 aa, Saccharomyces cerevisiae
MEGFNPAHIEHASPINSSDSHSSSFVYGLPKSASEYVVNHNEGRASASGNPAAVPSPIMTLNLKSTHSLNSDQHVHTSTSPTETIGHIHHVEKLNQNNLIHLDPVPNFEDKSDIKPWLQKIFYPQGIELVIERSDTFKVVFKCKAAKRGRNARRKRKDKPKGQDHEDEKSKINDDELEYASPSNATVTNGPQTSPDQTSSIKPKKKRCVSRFNNCPFRVRATYSLKRKRWSIVVMNNNHSHQLKFNPDSEEYKKFKEKLRKDNDVDAIKKFDELEYRTLANLPIPTATIPCDCGLTNEIQSFNVVLPTNSNVTSSASSSTVSSISLDSSNASKRPCLPSVNNTGSINTNNVRKPKSQCKNKDTLLKRTTMQNFLTTKSRLRKTGTPTSSQHSSTAFSGYIDDPFNLNEILPLPASDFKLNTVTNLNEIDFTNIFTKSPHPHSGSTHPRQVFDQLDDCSSILFSPLTTNTNNEFEGESDDFVHSPYLNSEADFSQILSSAPPVHHDPNETHQENLDIIDRFANSSQEHNEYILQYLTHFDAANHNNIGVPNNNSHSLNTQHNVSDLGNPLLRQEALVGSSSTKIFDELKFVQNGPHGSQHPIDFQHVDHRHLSSNEPQVRSHQYGPQQQPPQQLQYHQNQPHDGHNHEQHQTVQKDMQTHESLEIMGNTLLEEFKDIKMVNGELKYVKPED

SEQ ID NO: 220 - DNA, 2073 bp, Saccharomyces cerevisiae
atggaaggcttcaatccggctcacatagaacatgcgtcaccgattaattcatctgacagccattcatcctcctttgtatatgctctacccaaaagtgctagtgaatatgtagtcaaccataatgagggtcgtgcaagtgcaagtggaaatccagccgcagtgccgtctcccataatgacactgaatctcaaaagcacacattccctcaatagtgatcagcatgttcatacctcaacatcgccgacggaaactattgggcatattcatcatgtggaaaagctgaatcaaaacaatttgattcatctggatccagtacccaactttgaagataagtccgatattaagccttggttgcaaaagattttttatcctcaaggaatagaacttgtgatagaaaggtcggacacatttaaagttgtcttcaagtgtaaagctgctaaaaggggaaggaacgcgagaaggaaaagaaaagataagcccaaaggacaggaacacgaagacgagaaatccaagatcaatgatgacgaattagaatatgcgagtccttctaatgccacagtaaccaatgggcctcaaacatcgcccgatcaaacatcctccataaagccaaagaaaaaaagatgtgtatcgaggtttaataactgtccgtttagagtacgagctacttattcgttaaagaggaaaagatggagcattgttgtaatgaacaataaccattcacatcagctaaagtttaaccctgattccgaagagtacaaaaaattcaaagaaaaattaagaaaggataatgacgtagatgcaatcaagaaattcgacgaattggaatacagaactttggccaatttgcccattccaacagctacaatcccatgtgattgtggtttaacaaatgaaatacaaagtttcaatgtcgtcttgcccactaacagtaatgttacttcatcagcatcctcttcaactgtatcgtccatatcccttgattcatcgaatgcatctaaaaggccatgcttaccctctgtaaataacaccggtagtatcaataccaataacgtaaggaaaccgaaaagccagtgtaagaataaagacacactcttaaaaagaaccaccatgcagaactttctcacaactaaatcaaggctgcgtaagaccggtacgccaacatcttcgcaacactcatctacagcattttcaggatatattgatgatcctttcaatttgaatgaaatcttgccactgccggcatccgatttcaagctaaacactgtaacaaatttgaacgaaattgactttacgaacatttttaccaaatcgccgcatccacatagcgggtctacccatccaagacaagtcttcgaccaattggacgattgttcctctatactcttctctccattaactacaaacacgaataatgaatttgaaggagagtcagatgattttgttcattctccatatttgaactcagaggcagatttcagccaaattcttagtagtgctcccccagtccatcatgacccaagtgaaacacatcaggaaaaccaggatattattgatagatttgctaatagctcccaagaacataatgagtatattctacaatatttgacgcacttcgatgctgctaaccacaataatatcggcgttccaaacaacaattcacattcgctaaatactcagcataacgtttctgatctgggcaacccacttttaagacaagaagctttagttggcagctcttcaacaaaaatcttcgatgaattgaaatttgtacaaaatggcccacacggttctcaacatcctatagattttcaacatgttgaccatcgtcatctcagctctaatgaacctcaagtacgatcacatcaatatggtccgcaacagcagccaccgcagcaattgcaatatcaccaaaatcagccccacgacgggcataaccacgaacagcttcaaacagtacaaaaggatatgcaaacgcatgaatcgctagaaataatgggaaacacattattggaagagttcaaagacattaaaatggtgaacggcgagttgaagtatgtgaagccagaagattag

SEQ ID NO: 221 - protein, 690 aa, Saccharomyces cerevisiae
MEGFNPAHIEHASPINSSDSHSSSFVYALPKSASEYVVNHNEGRASASGNPAAVPSPIMTLNLKSTHSLNSDQHVHTSTSPTETIGHIHHVEKLNQNNLIHLDPVPNFEDKSDIKPWLQKIFYPQGIELVIERSDTFKVVFKCKAAKRGRNARRKRKDKPKGQEHEDEKSKINDDELEYASPSNATVTNGPQTSPDQTSSIKPKKKRCVSRFNNCPFRVRATYSLKRKRWSIVVMNNNHSHQLKFNPDSEEYKKFKEKLRKDNDVDAIKKFDELEYRTLANLPIPTATIPCDCGLTNEIQSFNVVLPTNSNVTSSASSSTVSSISLDSSNASKRPCLPSVNNTGSINTNNVRKPKSQCKNKDTLLKRTTMQNFLTTKSRLRKTGTPTSSQHSSTAFSGYIDDPFNLNEILPLPASDFKLNTVTNLNEIDFTNIFTKSPHPHSGSTHPRQVFDQLDDCSSILFSPLTTNTNNEFEGESDDFVHSPYLNSEADFSQILSSAPPVHHDPSETHQENQDIIDRFANSSQEHNEYILQYLTHFDAANHNNIGVPNNNSHSLNTQHNVSDLGNPLLRQEALVGSSSTKIFDELKFVQNGPHGSQHPIDFQHVDHRHLSSNEPQVRSHQYGPQQQPPQQLQYHQNQPHDGHNHEQLQTVQKDMQTHESLEIMGNTLLEEFKDIKMVNGELKYVKPED

SEQ ID NO: 222 - DNA, 2073 bp, Saccharomyces cerevisiae
atggaaggcttcaatccggctcacatagaacatgcgtcaccgattaattcatctgacagccattcatcctcctttgtatatgctctacccaaaagtgctagtgaatatgtagtcaaccataatgaggatcgtgcaagtgcaagtggaaatccagccgcagtgccgtctcccataatgacactgaatctcaaaagcacacattccctcaatagtgatcagcatgttcatacctcaacatcgccgacggaaactattgggcatattcatcatgtggaaaagctgaatcaaaacaatttgattcatctggatccagtacccaactttgaagataagtccgatattaagccttggttgcaaaagattttttatcctcaaggaatagaacttgtgatagaaaggtcggacacatttaaagttgtcttcaagtgtaaagctgctaaaaggggaaggaacgcgagaaggaaaagaaaagataagcccaaaggacaggaacacgaagacgagaaatccaagatcaatgatgacgaattagaatatgcgagtccttctaatgccacagtaaccaatgggcctcaaacatcgcccgatcaaacatcctccataaagccaaagaaaaaaagatgtgtatcgaggtttaataactgtccgtttagagtacgagctacttattcgttaaagaggaaaagatggagcattgttgtaatgaacaataaccattcacatcagctaaagtttaaccctgattccgaagagtacaaaaaattcaaagaaaaattaagaaaggataatgacgtagatgcaatcaagaaattcgacgaattggaatacagaactttggccaatttacccattccaacagctacaatcccctgtgattgtggtttaacaaatgaaatacaaagtttcaatgtcgtcttgcccactaacagtaatgttacttcatcagcatcctcttcaactgtatcgtccatatcccttgattcatcgaatgcatctaaaaggccatgcttaccctctgtaaataacaccggtagtatcaataccaataacgtaaggaaaccgaaaagccagtgtaagaataaagacacactcttaaaaagaaccaccatgcagaactttctcacaactaaatcaaggctgcgtaagaccggtacgccaacatcttcgcaacactcatctacagcattttcaggatatattgatgatcctttcaatttgaatgaaatcttgccactgccggcatccgatttcaagctaaacactgtaacaaatttgaacgaaattgactttacgaacatttttaccaaatcgccgcatccacatagcgggtctacccatccaagacaagtcttcgaccaattggacgattgttcctctatactcttctctccattaactacaaacacgaataatgaatttgaaggagagtcagatgattttgttcattctccatatttgaactcagaggcagatttcagccaaattcttagtagtgctcccccagtccatcatgacccaagtgaaacacatcaggaaaaccaggatattattgatagatttgctaatagctcccaagaacataatgagtatattctacaatatttgacgcacttcgatgctgctaaccacaataatatcggcgttccaaacaacaattcacattcgctaaatactcagcataacgtttctgatctgggcaacccacttttaagacaagaagctttagttggcagctcttcaacaaaaatcttcgatgaattgaaatttgtacaaaatggcccacacggttctcaacatcctatagattttcaacatgttgaccatcgtcatctcagctctaatgaacctcaagtacgatcacatcaatatggtccgcaacagcagccaccgcagcaattgcaatatcaccaaaatcagccccacgacgggcataaccacgaacagcttcaaacagtacaaaaggatatgcaaacgcatgaatcgctagaaataatgggaaacacattattggaagagttcaaagacattaaaatggtgaacggcgagttgaagtatgtgaagccagaagattag

SEQ ID NO: 223 - protein, 690 aa, Saccharomyces cerevisiae
MEGFNPAHIEHASPINSSDSHSSSFVYALPKSASEYVVNHNEDRASASGNPAAVPSPIMTLNLKSTHSLNSDQHVHTSTSPTETIGHIHHVEKLNQNNLIHLDPVPNFEDKSDIKPWLQKIFYPQGIELVIERSDTFKVVFKCKAAKRGRNARRKRKDKPKGQEHEDEKSKINDDELEYASPSNATVTNGPQTSPDQTSSIKPKKKRCVSRFNNCPFRVRATYSLKRKRWSIVVMNNNHSHQLKFNPDSEEYKKFKEKLRKDNDVDAIKKFDELEYRTLANLPIPTATIPCDCGLTNEIQSFNVVLPTNSNVTSSASSSTVSSISLDSSNASKRPCLPSVNNTGSINTNNVRKPKSQCKNKDTLLKRTTMQNFLTTKSRLRKTGTPTSSQHSSTAFSGYIDDPFNLNEILPLPASDFKLNTVTNLNEIDFTNIFTKSPHPHSGSTHPRQVFDQLDDCSSILFSPLTTNTNNEFEGESDDFVHSPYLNSEADFSQILSSAPPVHHDPSETHQENQDIIDRFANSSQEHNEYILQYLTHFDAANHNNIGVPNNNSHSLNTQHNVSDLGNPLLRQEALVGSSSTKIFDELKFVQNGPHGSQHPIDFQHVDHRHLSSNEPQVRSHQYGPQQQPPQQLQYHQNQPHDGHNHEQLQTVQKDMQTHESLEIMGNTLLEEFKDIKMVNGELKYVKPED

SEQ ID NO: 224 - DNA, 2073 bp, Saccharomyces cerevisiae
atggaaggcttcaatccggctcacatagaacatgcgtcaccgattaattcatctgacagccattcatcctcctttgtatatgctctacccaaaagtgctagtgaatatgtagtcaaccataatgagggtcgtgcaagtgcaagtggaaatccagccgcagtgccgtctcccataatgacactgaatctcaaaagcacacattccctcaatagtgatcagcatgttcatacctcaacatcgccgacggaaactattgggcatattcatcatgtggaaaagctgaatcaaaacaatttgattcatctggatccagtacccaactttgaagataagtccgatattaagccttggttgcaaaagattttttatcctcaaggaatagaacttgtgatagaaaggtcggacacatttaaagttgtcttcaagtgtaaagctgctaaaaggggaaggaacgcgagaaggaaaagaaaagataagcccaaaggacaggaacacgaagacgagaaatccaagatcaatgatgacgaattagaatatgcgagtccttctaatgccacagtaaccaatgggcctcaaacatcgcccgatcaaacatcctccataaagccaaagaaaaaaagatgtgtatcgaggtttaataactgtccgtttagagtacgagctacttattcgttaaagaggaaaagatggagcattgttgtaatgaacaataaccattcacatcagctaaagtttaaccctgattccgaagagtacaaaaaattcaaagaaaaattaagaaaggataatgacgtagatgcaatcaagaaattcgacgaattggaatacagaactttggccaatttacccattccaacagctacaatcccctgtgattgtggtttaacaaatgaaatacaaagtttcaatgtcgtcttgcccactaacagtaatgttacttcatcagcatcctcttcaactgtatcgtccatatcccttgattcatcgaatgcatctaaaaggccatgcttaccctctgtaaataacaccggtagtatcaataccaataacgtaaggaaaccgaaaagccagtgtaagaataaagacacactcttaaaaagaaccaccatgcagaactttctcacaactaaatcaaggctgcgtaagaccggtacgccaacatcttcgcaacactcatctacagcattttcaggatatattgatgatcctttcaatttgaatgaaatcttgccactgccggcatccgatttcaagctaaacactgtaacaaatttgaacgaaattgactttacgaacatttttaccaaatcgccgcatccacatagcgggtctacccatccaagacaagtcttcgaccaattggacgattgttcctctatactcttctctccattaactacaaacacgaataatgaatttgaaggagagtcagatgattttgttcattctccatatttgaactcagaggcagatttcagccaaattcttagtagtgctcccccagtccatcatgacccaagtgaaacacatcaggaaaaccaggatattattgatagatttgctaatagctcccaagaacataatgagtatattctacaatatttgacgcacttcgatgctgctaaccacaataatatcggcgttccaaacaacaattcacattcgctaaatactcagcataacgtttctgatctgggcaacccacttttaagacaagaagctttagttggcagctcttcaacaaaaatcttcgatgaattgaaatttgtacaaaatggcccacacggttctcaacatcctatagattttcaacatgttgaccatcgtcatctcagctctaatgaacctcaagtacgatcacatcaatatggtccgcaacagcagccaccgcagcaattgcaatatcaccaaaatcagccccacgacgggcataaccacgaacagcttcaaacagtacaaaaggatgtgcaaacgcatgaatcgctagaaataatgggaaacacattattggaagagttcaaagacattaaaatggtgaacggcgagttgaagtatgtgaagccagaagattag

SEQ ID NO: 225 - protein, 690 aa, Saccharomyces cerevisiae
MEGFNPAHIEHASPINSSDSHSSSFVYALPKSASEYVVNHNEGRASASGNPAAVPSPIMTLNLKSTHSLNSDQHVHTSTSPTETIGHIHHVEKLNQNNLIHLDPVPNFEDKSDIKPWLQKIFYPQGIELVIERSDTFKVVFKCKAAKRGRNARRKRKDKPKGQEHEDEKSKINDDELEYASPSNATVTNGPQTSPDQTSSIKPKKKRCVSRFNNCPFRVRATYSLKRKRWSIVVMNNNHSHQLKFNPDSEEYKKFKEKLRKDNDVDAIKKFDELEYRTLANLPIPTATIPCDCGLTNEIQSFNVVLPTNSNVTSSASSSTVSSISLDSSNASKRPCLPSVNNTGSINTNNVRKPKSQCKNKDTLLKRTTMQNFLTTKSRLRKTGTPTSSQHSSTAFSGYIDDPFNLNEILPLPASDFKLNTVTNLNEIDFTNIFTKSPHPHSGSTHPRQVFDQLDDCSSILFSPLTTNTNNEFEGESDDFVHSPYLNSEADFSQILSSAPPVHHDPSETHQENQDIIDRFANSSQEHNEYILQYLTHFDAANHNNIGVPNNNSHSLNTQHNVSDLGNPLLRQEALVGSSSTKIFDELKFVQNGPHGSQHPIDFQHVDHRHLSSNEPQVRSHQYGPQQQPPQQLQYHQNQPHDGHNHEQLQTVQKDVQTHESLEIMGNTLLEEFKDIKMVNGELKYVKPED

SEQ ID NO: 226 - DNA, 1494 bp, Saccharomyces cerevisiae
atgttgaaatcaactgctacaagatcgataacaagattatctcaagtttacaacgttccagcggccacatatagggcttgtttggtaagcaggagattctattcccctcctgcagcaggcgtgaagttagacgacaacttctctctggaaacgcataccgatattcaggctgctgcaaaggcacaggctagtgcccgtgcgagtgcatccggtaccaccccagatgctgtagtagcttctggtagcactgcaatgagccatgcttatcaagaaaacacaggttttggtactcgtcccatatatcttgacatgcaagccactacaccaacagaccctagggttttggatacgatgttgaagttttatacgggactttatggtaatcctcattccaacactcactcttacggttgggaaacaaatactgctgtggaaaatgctagagctcacgtagcaaagatgatcaatgccgaccccaaggaaataatattcacttcgggagcgaccgaatctaataatatggttcttaagggtgtcccaagattttataagaagactaagaaacacatcatcaccactagaacggaacacaagtgtgtcttggaagccgcacgggccatgatgaaggagggatttgaagtcactttcctaaatgtggacgatcaaggtcttatcgatttgaaggaattggaagatgccattagaccagatacctgtctcgtctctgtgatggctgtcaataatgaaatcggtgtcattcaacctattaaagaaattggtgcaatttgtagaaagaataagatctactttcataccgacgccgcacaagcctatggtaagattcacattgatgtcaatgaaatgaacactgatttactatcaatttcttctcacaagatttacggtccaaagggaataggtgccatctatgtaagaaggagaccaagagttagattagaacctttactatccggtggtggccaagagagaggattgagatctggtactttggcccccccattggtagcgggatttggtgaagctgcgagattgatgaagaaagaatttgacaacgaccaagctcacatcaaaagactatccgataaattagtcaaaggtctattatccgctgaacataccacgttgaacggatctccagatcatcgttatccagggtgtgttaacgtttctttcgcctacgtggaaggagaatctttattgatggcactaagggatatcgcattatcctcgggttcagcctgtacatctgcttccctagaaccttcttatgttttacatgcgctgggtaaggatgatgcattagcccattcttccatcagatttggtattggtagatttagtactgaagaggaggtcgactacgtcgttaaggccgtttctgacagagtaaaattcttgagggaactttcaccattatgggaaatggttcaagaaggtattgacttaaactccatcaaatggtcaggtcattga

SEQ ID NO: 227 - protein, 497 aa, Saccharomyces cerevisiae
MLKSTATRSITRLSQVYNVPAATYRACLVSRRFYSPPAAGVKLDDNFSLETHTDIQAAAKAQASARASASGTTPDAVVASGSTAMSHAYQENTGFGTRPIYLDMQATTPTDPRVLDTMLKFYTGLYGNPHSNTHSYGWETNTAVENARAHVAKMINADPKEIIFTSGATESNNMVLKGVPRFYKKTKKHIITTRTEHKCVLEAARAMMKEGFEVTFLNVDDQGLIDLKELEDAIRPDTCLVSVMAVNNEIGVIQPIKEIGAICRKNKIYFHTDAAQAYGKIHIDVNEMNTDLLSISSHKIYGPKGIGAIYVRRRPRVRLEPLLSGGGQERGLRSGTLAPPLVAGFGEAARLMKKEFDNDQAHIKRLSDKLVKGLLSAEHTTLNGSPDHRYPGCVNVSFAYVEGESLLMALRDIALSSGSACTSASLEPSYVLHALGKDDALAHSSIRFGIGRFSTEEEVDYVVKAVSDRVKFLRELSPLWEMVQEGIDLNSIKWSGH

SEQ ID NO: 228 - DNA, 1494 bp, Zygosaccharomyces rouxii
atgctgagacagggaattactggattgactagagtctccagattattgagagttggtgctaacagtaggcctgcattgtccggtggcattagattatattccaaagctgcgtccaatgctgcgctgaagtttgcagacgatgctgcgctagagacacatactgatactgaggcagccgcaagagaacagactgtaactagagctgcggctacctcttctccatccgaggttattggttccagtacttcagcacttcagaatgcatatgctgaaaataccgggtttggtacaagacctatctatctggatatgcaggctactacaccaactgatcccagagttctagatactatgttgaaattttacacgggtctctatggtaacccacattctaatacccatgcatacggttgggaaactaataaagaagtggaaaatgcaagaaagaatgtggccaatgtgattaacgcagatccaaaagaaatcatttttacttcaggtgctaccgaatctaataacatggttttaaaaggtgtaccaagattttacaagagaagtaagaaacatatcattactacgagaacggagcataagtgtgttttggaggcagcaagagccatggttaatgaagggtttgatgtgacatttttgaatgtggacaatgaagggttagtaaatttgaaagagctagaagaagctatccgtccagacacttgtcttgtgtctgtgatggctgttaacaacgagatcggtgtcatgcagcctttgaaagaaattggtagcatctgtaaaaagcacaaggtttacttccataccgatgccgctcaggcatatggtaaagttcccatagatgttaatgaaatgaatatcgatttactatccgtctcttcgcacaagatttatggtccaaagggtgcaggtgcagtcttcgtgagaagaagaccaagagttagattagaccctatcttttctggtggtggacaagaaagaggtcttaggtcaggaactttgcctccacctttggtcgcaggttttggtgaagccgccagattagtggttcaagaaaatgacgctgatatcgctcatatcaagagactttcagagaaattgactaagggtcttttgtcaattcctgacacttctttgaatggttctgcagaacaccgttacccaggttgtgtgaacgtgtccttcgcatatgtggaaggtgagtcattgctaatggctatgagagatatcgcattatcatctggttccgcttgtacttctgcttcgttagaaccatcatacgttctacatgctatcggtaaagacgatgcattggctcattcttccattagatttggtatcggtagatttaccactgaagaagaagtcgagtacgtggtagacgccatcagtaagcgtgttaagtttttgagggaactatcacctctatgggagatggttcaagaaggtatcgatttgaactctatcgagtggtcaggccactga

SEQ ID NO: 229 - protein, 497 aa, Zygosaccharomyces rouxii
MLRQGITGLTRVSRLLRVGANSRPALSGGIRLYSKAASNAALKFADDAALETHTDTEAAAREQTVTRAAATSSPSEVIGSSTSALQNAYAENTGFGTRPIYLDMQATTPTDPRVLDTMLKFYTGLYGNPHSNTHAYGWETNKEVENARKNVANVINADPKEIIFTSGATESNNMVLKGVPRFYKRSKKHIITTRTEHKCVLEAARAMVNEGFDVTFLNVDNEGLVNLKELEEAIRPDTCLVSVMAVNNEIGVMQPLKEIGSICKKHKVYFHTDAAQAYGKVPIDVNEMNIDLLSVSSHKIYGPKGAGAVFVRRRPRVRLDPIFSGGGQERGLRSGTLPPPLVAGFGEAARLVVQENDADIAHIKRLSEKLTKGLLSIPDTSLNGSAEHRYPGCVNVSFAYVEGESLLMAMRDIALSSGSACTSASLEPSYVLHAIGKDDALAHSSIRFGIGRFTTEEEVEYVVDAISKRVKFLRELSPLWEMVQEGIDLNSIEWSGH

SEQ ID NO: 230 - DNA, 1521 bp, Saccharomyces castellii
atgttgagacgcacagttgcatcaggctcctccatgatgaggatggccaaactgccactctccagcaggacagcactagcatccgccactactctccccagaagacactactcccccgcagcagccgtcaaattgaccaacgatatctccctggagacgcacacagacacgcaaatggcctccagggatcaggctgccgcccgtgcagaagcctctgctgggtcctccgccaaggctgccgccatcatcgacgagatcgacacctcaggtcgcactgcgttgaacgctgcttaccaggagaacacagggttcggtacaagacccatctatatggacatgcaagccaccacgcccacggacccaagggtcctggataccatgttgaagttctttacgggactatacgggaacccacattctaatactcattcgtatggttgggagaccaataaggaagtggagaccgcaagggatcatattgccaaattgattggtgcggattctaaagagatcgtattcacgtcgggagccactgaatctaataatatggtagtgaagggggtcgctaggttttataagaagaccaagaaacatatcattacaacgagaacggaacataagtgtgttctggaggctgctagagccatgatcaatgaagggtttgaagtcacgtttttgcccgtggatgaagctggattggtggatttgaaagaattggaagccgctattagaccagatacttgcctggtgtctgttatggccgtgaataacgaaattggggtcattcaaccattgaaggagattggtcaaatttgtaagaaacataaagtgtatttccatacagatgcggctcaagcatatgggaagattaaattggatgtcaatgaaatgaatatagatttactttccatatcatcacataagatttatggtcccaagggtattggtgctctttacgtgagaagaagaccaagagttagattggaacctttattctcaggtggtggtcaagaaagaggtttaagatcggggactttagctccaccattagtcgcagggttcggtgaagctgctagattaatgcatcaagaatttgaatcggatcaagctcatattaagagattatcagataaattagtcaagggactattggcaaatgatcatactaacttgaacggttctgcaagtcatcgttatcccggttgtattaacgtttcctttgcctatgtcgaaggtgaatctttattgatggcattaagagatatcgctctatcctctgggtccgcatgtacttctgcatccctggaaccatcatacgtattacatgccctgggaagagatgatgcattggcacattcatccattagattcggtatcggtaggtttaccacggaaagggaggtagattatgtcattaaggcaatctcagaaagagtagaattcttaagaagtatttctcccctatgggaaatggttcaagaaggtattgatttggattcaattgaatggtcaggtcattaa

SEQ ID NO: 231 - protein, 506 aa, Saccharomyces castellii
MLRRTVASGSSMMRMAKLPLSSRTALASATTLPRRHYSPAAAVKLTNDISLETHTDTQMASRDQAAARAEASAGSSAKAAAIIDEIDTSGRTALNAAYQENTGFGTRPIYMDMQATTPTDPRVLDTMLKFFTGLYGNPHSNTHSYGWETNKEVETARDHIAKLIGADSKEIVFTSGATESNNMVVKGVARFYKKTKKHIITTRTEHKCVLEAARAMINEGFEVTFLPVDEAGLVDLKELEAAIRPDTCLVSVMAVNNEIGVIQPLKEIGQICKKHKVYFHTDAAQAYGKIKLDVNEMNIDLLSISSHKIYGPKGIGALYVRRRPRVRLEPLFSGGGQERGLRSGTLAPPLVAGFGEAARLMHQEFESDQAHIKRLSDKLVKGLLANDHTNLNGSASHRYPGCINVSFAYVEGESLLMALRDIALSSGSACTSASLEPSYVLHALGRDDALAHSSIRFGIGRFTTEREVDYVIKAISERVEFLRSISPLWEMVQEGIDLDSIEWSGH

SEQ ID NO: 232 - DNA, 1494 bp, Kluyveromyces lactis
atgacgatgacattgttaagaggagtgagtgttttttccaggcgtgtgcccgttgctggtggttttggctatttgaagcgtgctgatattagtaacgttgttttacagggacggacgtatgcaagtgccaaggttgccttagcagaagatttgactttggaaacgcatacagataaccaagcagcagctattgagcaagccaacgaaagagccgtgtcaaatcccgatgttttggacagtggtatacattctttgcaacatgcataccgtgaatccggggaatacggtacaagacctatatatctcgacatgcaagctaccactccaacagacccaagagttctagataccatgttgaaattctacacggggctttatggtaatcctcattcaaatactcatagctatggttgggaaactaacaaggagatcgaacaagcaagaaaatacatcgccgatgttatcaaagctgatccaaaggagataatcttcacttccggtgctacagaatcaaataatatggctttgaagggtgtctcaaggttttacaagaagacaagaaaccatattatcactacaagaactgaacacaagtgtgtgttagaagccgccagagctatgaagaacgaaggatacgaaatcacatttttgaatgttgatgagcagggtttgatcaatttagaagagttggaagctgcgatcagacctgaaacttgtttagtttctgttatggccgtcaacaacgaaattggtgttatgcaaccattgaaagaaattggtgaactttgtagaaaacgcaaagttttcttccataccgatgcagcgcaagcttatggtaagatacctatcgatgtgaacgaaatgaaaatagatctgatgtccatttcctcacacaaaatttatggtccaaagggaattggtgccatttacgttagaagaaagccaagagtcagattagatccgcttatctccggtggtggtcaagaaagaggtttacgttctggtacattggctccacctttggttgccggcttcggggaagcagcaagattgatgatgaaagaatacgagaacgactcaaatcacattaaaagattatctgacaaattaatgaacgctttgttatctattgaccatacaatcttaaacggttctgctgaccatcgttacccaggttgtgttaacatttcattcgcatatgtcgaaggtgaatccttattgatggctcttagagatattgctttgagttctggttctgcttgtacttcggcatctttagaaccatcttatgtgttgcatgcattgggtaaagatgatgctttagcacactcttccatcagattcggtattggtagattcaccactgatgaagaaattgattacgttatcaaggctatcacggaaagagttgatttcctaagagagttgtccccattatgggagatggtcaaggaaggtattgacttgaactccatcgaatggtcaggtcattaa

SEQ ID NO: 233 - protein, 497 aa, Kluyveromyces lactis
MTMTLLRGVSVFSRRVPVAGGFGYLKRADISNVVLQGRTYASAKVALAEDLTLETHTDNQAAAIEQANERAVSNPDVLDSGIHSLQHAYRESGEYGTRPIYLDMQATTPTDPRVLDTMLKFYTGLYGNPHSNTHSYGWETNKEIEQARKYIADVIKADPKEIIFTSGATESNNMALKGVSRFYKKTRNHIITTRTEHKCVLEAARAMKNEGYEITFLNVDEQGLINLEELEAAIRPETCLVSVMAVNNEIGVMQPLKEIGELCRKRKVFFHTDAAQAYGKIPIDVNEMKIDLMSISSHKIYGPKGIGAIYVRRKPRVRLDPLISGGGQERGLRSGTLAPPLVAGFGEAARLMMKEYENDSNHIKRLSDKLMNALLSIDHTILNGSADHRYPGCVNISFAYVEGESLLMALRDIALSSGSACTSASLEPSYVLHALGKDDALAHSSIRFGIGRFTTDEEIDYVIKAITERVDFLRELSPLWEMVKEGIDLNSIEWSGH

SEQ ID NO: 234 - DNA, 1437 bp, Kluyveromyces waltii
atgcttaggtctattaaacgttcagtaatcagcaggcagaggttgaacagcggggtatggcagaggggctatgctactgcaaaagtagcgtttgacctgcctttggagacgcacacagacctgcaaaaggccaatgaagatctggcacaggcaagagccaactcggcagaggtggtacagtctggttcgactgctttgaagcatgcatatcaggagaatactgggtttgggaccaggcccatatatttggatatgcaggccactactcccacagatcctcgtgtattggatactatgttaaagttttacaccggactgtacggcaatcctcactccaacacccacagttatggctgggaaaccaacaaggaagttgaaaccgcgcggaagcacatcgcagacctgattaatgcagacattaaagagatcatctttacctcgggagctacggagtcgaacaacatggttctgaaaggtgtgtctagattttacaaaaagacgaagaaccacatcattaccacaagaacagagcacaagtgtgttcttgaagctgccagggcgatgaagaatgagggctacgaagtcactttcttaaatgtcaacgagcagggcctcatagacttgaaagagctggaggctgccatcaggcctacaacttgtctcgtgtcgatcatggctgtcaacaatgagatcggagttatgcaacctatcaaggaaattggagccttgtgtcgaaaaaataaggtatttttccatactgatgctgcacaggcttacggaaaaattcccctagatgttaatgagatgaacatcgatctgttatccatttcatcccacaagatttacggcccaaagggcatgggggctgtctatgttagaaggcggcctcgtgttagacttgaacccattatttctggaggaggtcaagagagaggattgagatctggtacactggctccatctttagttgcgggttttggtgaagctgctaggctcatgaagcaagagtacgaagctgataccgcgcacatcagaagattatctgaaaaactaacaaaaggtcttttggccattgaacacacatcactgaacggatcaccggaccatcgctatcctggatgcgttaatgtatcctttgcttacgtcgaaggtgaatccttgctgatggctctcagagatattgccttaagttcaggatctgcctgtacttcggcctccttggagccctcttacgtgcttcacgctctaggtaaagatgatgccatggcgcactcttccatcaggtttggtgtcggcagattcaccactgacgaggaagtcgattatgtgatcaaggcaatcacagagagagtggagtttttgagagaactctcgccactttgggagatggtcaaagaaggtatcgacttgaactccattgaatggtcaggtcattaa

SEQ ID NO: 235 - protein, 478 aa, Kluyveromyces waltii
MLRSIKRSVISRQRLNSGVWQRGYATAKVAFDLPLETHTDLQKANEDLAQARANSAEVVQSGSTALKHAYQENTGFGTRPIYLDMQATTPTDPRVLDTMLKFYTGLYGNPHSNTHSYGWETNKEVETARKHIADLINADIKEIIFTSGATESNNMVLKGVSRFYKKTKNHIITTRTEHKCVLEAARAMKNEGYEVTFLNVNEQGLIDLKELEAAIRPTTCLVSIMAVNNEIGVMQPIKEIGALCRKNKVFFHTDAAQAYGKIPLDVNEMNIDLLSISSHKIYGPKGMGAVYVRRRPRVRLEPIISGGGQERGLRSGTLAPSLVAGFGEAARLMKQEYEADTAHIRRLSEKLTKGLLAIEHTSLNGSPDHRYPGCVNVSFAYVEGESLLMALRDIALSSGSACTSASLEPSYVLHALGKDDAMAHSSIRFGVGRFTTDEEVDYVIKAITERVEFLRELSPLWEMVKEGIDLNSIEWSGH

SEQ ID NO: 236 - DNA, 1488 bp, Saccharomyces bayanus
atgttgaaattaactactgcaaagtcgattacgagactatctcagctctataatgttccggccgccacgtataggctaaagggtttgaggttttattctccccccgcagcaggcgtaaaattggacgacaacttttcattagaaacccatacggatatccaggctgctgcaaaggcacaggctagtgcccgtgctagtgcatcaggaacgactccggatgccgtagtggcttctggaagcactgctatgagtcatgcttatcaagaaaacactggatttggtacccgtcctatatatcttgacatgcaagccacaaccccaacagaccctagggttttagacaccattttaaaattctacacaggactttatggtaatcctcattccaacactcactcttacggttgggaaactaatactgccgtggagaacgctagagcccatgtggccaagttgatcaacgccgaccccaaggaaataatattcacctcgggtgccaccgagtctaataacatggttcttaaaggtgtcccaagattctataaaaagaccaagaaacaccttatcaccactagaacagaacacaagtgtgttttggaggctgccagagccatgatgaaagaagggtttgaagtcactttcttgaacgtgaacgatcaagggcttatcgatttgaaggaattggaagctgctattagaccagacacatgccttgtctctgtgatggctgtcaataatgaaatcggtgttattcaacctatcaaagaaatcggggccatctgtaggaagaataagatctatttccacacggacgccgcacagtcatatggtaaaatccccatggatgttaatgaaatgaacatcgatctattatcgatttcgtcccataagatttatggtccaaagggtattggtgccatctatgttagaagaagaccaagagttagactagaaccattgttatccggaggtggtcaagaaagaggtttaagatcaggaactttagcacctccattggtggcggggttcggtgaagctgcaagactaatgaaaaaggaatttgacaacgatcaagcacacatcaaaagattatcagacaaactagtcaacggtttgttatctgcagaacacactacattgaacggatctccagatcatcgttatccaggttgtatcaacgtttcatttgcctatgtggaaggtgagtctctactaatggcactaagagatatcgcattatcctcgggttcagcctgtacatccgcttccttagaaccttcttatgttctacatgcattgggtaaggatgatgctttggcacattcttccatcaggtttggtatcggtagattcagtactgaggaggaagtcgactatgtcgttaaggccgttgctgatagagtaaagttcttgagggagctttcaccattgtgggaaatggttcaagaaggtatcgatctaaattctatcaagtggtcaggtcattga

SEQ ID NO: 237 - protein, 495 aa, Saccharomyces bayanus
MLKLTTAKSITRLSQLYNVPAATYRLKGLRFYSPPAAGVKLDDNFSLETHTDIQAAAKAQASARASASGTTPDAVVASGSTAMSHAYQENTGFGTRPIYLDMQATTPTDPRVLDTILKFYTGLYGNPHSNTHSYGWETNTAVENARAHVAKLINADPKEIIFTSGATESNNMVLKGVPRFYKKTKKHLITTRTEHKCVLEAARAMMKEGFEVTFLNVNDQGLIDLKELEAAIRPDTCLVSVMAVNNEIGVIQPIKEIGAICRKNKIYFHTDAAQSYGKIPMDVNEMNIDLLSISSHKIYGPKGIGAIYVRRRPRVRLEPLLSGGGQERGLRSGTLAPPLVAGFGEAARLMKKEFDNDQAHIKRLSDKLVNGLLSAEHTTLNGSPDHRYPGCINVSFAYVEGESLLMALRDIALSSGSACTSASLEPSYVLHALGKDDALAHSSIRFGIGRFSTEEEVDYVVKAVADRVKFLRELSPLWEMVQEGIDLNSIKWSGH

SEQ ID NO: 238 - DNA, 1473 bp, Ashbya gossypii
atgttgaggcaagtgcttaggaggtcattatcagattctcggagaccgttgaggtccgttggcagcatcagctgcagcgcccgggcatccgggattggaatgcgcgcatactcatcgcaaatattcaaggagggcatgcagctcgagacgcacacagatatccagagcgctgcccgcgaacaggcgcaagaaagaatggggtcggaggcactggcgtcgaacaactccgtgttgaagcacgcataccaggagtctgtcgaccacgggacccggccaatatacctggacatgcaggcaaccacgcccacggacccgcgggtggtggacacgatgctgaagttctacaccgggctgtacggcaacccgcactccaacacccacagctacggatgggagacgagccaggaggtcgagaaggcgcgcaagaacgtggccgatgtgataaaggcagaccccaaggaaatcatattcacgtccggcgccacggagtcgaacaacatggcgctgaaaggcgttgcgcggttttacaagaagcggaagaaccacatcatcacaaccaggacggagcacaagtgtgtgctggaggccgcgagatcaatgaaggacgagggctttgacgtgacgtttctgaacgtcaatgaggacggtctggtcagtctcgaggagctcgagcaggccatacggccagagacctccctggtgtctgtgatgtcggtgaacaacgagattggtgtggtgcagccgatcaaggaaatcggtgcaatctgcaggcgccacaaggtgttcttccactcggatgctgctcaggcgtacggaaagataccgattgacgtggacgagatgaacattgatctgctctcgatttcgtcgcacaagatttacgggcccaaggggatcggtgcgttgtacgtcaggagacgtccaagagtgcgcatggagccgctgctttccgggggcggtcaagaaagggggttccgttctggtactttgccccctccgttggtcgtgggtctaggccatgcggcgaagctgatggtggaggagtatgaatatgactctgcccacgtcagacgcctttcagacaggttattgaagggcttgctgtcaatagagcaaaccacgctaaacggctccgcagaccatcgctatcctggctgcgtgaatgtctcttttgcattcgtggagggtgagtctctcttaatggccttgcgtgacatcgccttgagctcaggttctgcctgtacgtccgcttctttggagccatcatacgtgctacatgccattggtagagatgacgctttagcgcactcgtcgatcaggttcggcattggtaggttcaccactgaggctgaggtggactacgttatcaaggccatcaccgagagagtagagtttttgagggaattgtccccactgtgggagatgtacaaagatggcatcgacctaaacaccatagaatggtcgggccattga

SEQ ID NO: 239 - protein, 490 aa, Ashbya gossypii
MLRQVLRRSLSDSRRPLRSVGSISCSARASGIGMRAYSSQIFKEGMQLETHTDIQSAAREQAQERMGSEALASNNSVLKHAYQESVDHGTRPIYLDMQATTPTDPRVVDTMLKFYTGLYGNPHSNTHSYGWETSQEVEKARKNVADVIKADPKEIIFTSGATESNNMALKGVARFYKKRKNHIITTRTEHKCVLEAARSMKDEGFDVTFLNVNEDGLVSLEELEQAIRPETSLVSVMSVNNEIGVVQPIKEIGAICRRHKVFFHSDAAQAYGKIPIDVDEMNIDLLSISSHKIYGPKGIGALYVRRRPRVRMEPLLSGGGQERGFRSGTLPPPLVVGLGHAAKLMVEEYEYDSAHVRRLSDRLLKGLLSIEQTTLNGSADHRYPGCVNVSFAFVEGESLLMALRDIALSSGSACTSASLEPSYVLHAIGRDDALAHSSIRFGIGRFTTEAEVDYVIKAITERVEFLRELSPLWEMYKDGIDLNTIEWSGH

SEQ ID NO: 240 - DNA, 1482 bp, Saccharomyces kluyveri
atgctaagatctattgcaggttctttaactaaaagacaagcctttgtatctctacaacaccatgccagctcaaccgtgggtgtgtctcgctggattccccgtcatacatatgctacggccaaggtagccgaggatcttcaactagagacccacaccgatgtacaaagtgccagcgaagaacaagctaacgtacgtaccggctccgttgcgagcgaagcagcagcttcgggtactaccgctttgaagcacgcttatcaagaaagctctgattttggtacgaggccaatctatttggatatgcaagccaccactccaacggatccaagagtcctggacactatgctgaagttttacactgggttgtatggtaaccctcactctaatacgcatagttacggttgggaaaccaataaggaaatcgaaacggcacgtgagcacgttgccaacgtaattaacgctgaccctaaagaaatcatatttacatctggtgcaaccgagtcgaataatatggttgtcaaaggtgtcagccggttttacaaaaagaccaaaaagcatattattaccaccagaactgaacataaatgtgttttagaggcagtcagagctatgaaaaatgaaggttttgaggttacctttttaaacgttgatgcccaaggtttggttgatttaaaggatttagaaggggcaatcagaccagacacttgcttagtttcggtgatggcggttaataatgagattggtgtcatgcagccaatcaagcagattggtgaaatatgtaggaaacgcaaggtttactttcacacggacgctgcccaagcgtacggtaagatccctatcgatgttaacgagatgaacattgatttgctatccgtttcctctcacaaaatttatggtccaaagggtatcggcgcagtttatgtcagaagaagaccaagagttagattggatccaataatttctggaggtggtcaggagagaggtttgagatcgggtactctggctcctcccttagttgctggttttggcgaggccgccaggttgatgaaacgagaatttgaaaacgattcccagcatattaagagattatctgaaaagcttacgaagggtttgctttcaatcgaacacacctctctgaatggttctcctgaccatcgttatccaggctgtgtcaacgtttcttttgcctacgttgaaggtgagtccttgttgatggccttaagagatattgctttgagttcaggttccgcctgtacttcggcctctttggagccttcatacgttctacatgcattgggtaaggatgatgctttagctcattcttctatcagatttggtattggtaggttcacaaccgaacaagaagttgattatgttatcaaagctattactgaaagagtcgaattcttaagagaattatccccattgtgggaaatggtgaaggaaggtattgacttggactctattgaatggtctggtcactga

SEQ ID NO: 241 - protein, 493 aa, Saccharomyces kluyveri
MLRSIAGSLTKRQAFVSLQHHASSTVGVSRWIPRHTYATAKVAEDLQLETHTDVQSASEEQANVRTGSVASEAAASGTTALKHAYQESSDFGTRPIYLDMQATTPTDPRVLDTMLKFYTGLYGNPHSNTHSYGWETNKEIETAREHVANVINADPKEIIFTSGATESNNMVVKGVSRFYKKTKKHIITTRTEHKCVLEAVRAMKNEGFEVTFLNVDAQGLVDLKDLEGAIRPDTCLVSVMAVNNEIGVMQPIKQIGEICRKRKVYFHTDAAQAYGKIPIDVNEMNIDLLSVSSHKIYGPKGIGAVYVRRRPRVRLDPIISGGGQERGLRSGTLAPPLVAGFGEAARLMKREFENDSQHIKRLSEKLTKGLLSIEHTSLNGSPDHRYPGCVNVSFAYVEGESLLMALRDIALSSGSACTSASLEPSYVLHALGKDDALAHSSIRFGIGRFTTEQEVDYVIKAITERVEFLRELSPLWEMVKEGIDLDSIEWSGH

SEQ ID NO: 242 - DNA, 1455 bp, Candida glabrata
atgatgtctgctgcgggcagacatgtcagaaggtataccccgggtgctactttgggtgccgcagcagcagctgcgaaggctatcaagatgactgacaacgtttctcttgagacacacacagatattcaagctgctgcaaaggagcaggctgatgttagggcttctgctcaaggtcagtctggagatgaggtgttgaagagcggggagacagtcttacaccatgcttacaaagaggacagtgggtacggtacaaggcctatatatatggacatgcaggccacgacgcctacggatcctcgtgtcctggacgtgatgcttaagttctacacaggtctttatggtaaccctcattctaacacgcatgcctatggttgggagaccaacaaagaggttgagaccgccagggaccatgtagccaaggtgatccgcgctgatccaaaggaaataatattcacctcaggtgccactgaatccaataacttggccatcaaaggtgtaggaaggttttataagaagaccaagaagcatattatcacaacaaggacggaacacaagtgcgcattggaagcagcaagaggtatgattaacgaagggtttgatgtgacatttttgagtgtcgacaaccaaggtctcatcgatatgaaagaacttgaagaggccatcaggccagatacttgtctagtttcagttatggctgtcaataatgaaattggtgtcatgcaaccattaaaagagataggtgccttgtgtagaaagaacaaaatatattttcacacagatgcagctcaagcttacggtaaagtcccaatagacgttaatgaaatgaacattgacttgctgtccgtgtcttcgcacaagatttatggtccaaagggtattggtgcgctgtatgttagaagaagaccaagagtaagacttgagccactactgtctggtggtggtcaagaaagaggtttgagatcgggaaccttagctcctcccctagttgccggtttcggtgaagccgccagactaatgcacgaagaatacaatgccgacatagcgcacattgacaaactgtcatcaaaacttgtaaacggtctgttgagtctggaacatacctcactaaatggttcagctgaaaagcgttatccaggttgtgtaaatgtctcatttgcttacgttgaaggtgagtctttactaatggccttgagggatattgcactttcatctggttctgcatgcacatctgcatctttagaaccatcatatgtcctacatgctttgggtaaagatgacgctttagctcactcttctatccgtttcggtattggtagattcaccaccgaagaggaagtggattacgttttaaaagccatcactgagagagtgaagttcttgagagaactatctcctctatgggaaatggtacaagaaggtatcgatttgaattccatccaatggtctggccattag

SEQ ID NO: 243 - protein, 484 aa, Candida glabrata
MMSAAGRHVRRYTPGATLGAAAAAAKAIKMTDNVSLETHTDIQAAAKEQADVRASAQGQSGDEVLKSGETVLHHAYKEDSGYGTRPIYMDMQATTPTDPRVLDVMLKFYTGLYGNPHSNTHAYGWETNKEVETARDHVAKVIRADPKEIIFTSGATESNNLAIKGVGRFYKKTKKHIITTRTEHKCALEAARGMINEGFDVTFLSVDNQGLIDMKELEEAIRPDTCLVSVMAVNNEIGVMQPLKEIGALCRKNKIYFHTDAAQAYGKVPIDVNEMNIDLLSVSSHKIYGPKGIGALYVRRRPRVRLEPLLSGGGQERGLRSGTLAPPLVAGFGEAARLMHEEYNADIAHIDKLSSKLVNGLLSLEHTSLNGSAEKRYPGCVNVSFAYVEGESLLMALRDIALSSGSACTSASLEPSYVLHALGKDDALAHSSIRFGIGRFTTEEEVDYVLKAITERVKFLRELSPLWEMVQEGIDLNSIQWSGH

SEQ ID NO: 244 - DNA, 1437 bp, Kluyveromyces thermotolerans
atgttgagatcttttgggcgttctgtattcagcaggcaaaggctagttggagccgttgcacgcagaggctatgcaacagcaaaagtggcattcgatgtgccactagaaacacacacagacttacagaaggcgaatgaggatttagcacaggccaggtcgaattctgcggaggttatcgaatcaggctccaccgctttgaaacacgcatatcaggaaaatacaggctttggcacccgccccatctaccttgacatgcaggccacgacacctactgacccccgggttctcgacaccatgctaaagttctatacagggctttatggaaatccgcactccaatacccatagctatggatgggaaacaaacaaggaggtggaaacggcgcgcaagcacattgctgacgttatcaacgcagatgtcaaagaaatagtcttcacatctggagccactgaatcaaacaatatggccttgaagggcgtctccaggttttacaagaaaacaaagaaccacatcattacaacgagaacggaacataagtgtgtcctagaggcggcaagggcaatgaaaaatgagggttatgacgtgacgtttttaaacgttgatgagtatggtctcgtggacttgaaggaacttgaagcagcgattaaacctacaacttgtctggtatctgttatggcagtaaacaacgagattggagtcatgcaacctatcaaggagattggtgctatttgcaggaagaataaggtttttttccacactgacgccgcccaggcttatggaaaaataccactagatgttaacgacatgaacatcgatcttctttcgatttcctcacataaaatttacggtccaaaaggtatgggcgccttgtttgttagaagaaggcccagagttagactggaccctattatttccggcggcggccaagagagaggcttgaggtctgggactttggctccttctttggttgcagggtttggtgaagcagcacgactagtgaagcaagagtacgaaactgacatagatcatgtcaaaaggctttctgaaaagctgacgaaaggtcttttggctattgaacacacgtctctaaacggctctccagaccaccgttacccaggttgcgtcaatgtatcctttgcttatgtggaaggagaatccttgttaatggctcttagagacatcgcactaagctcgggctctgcctgtacttcggcttcacttgagccgtcgtatgtactacatgcactaggaaaagacgatgccatggcacattcctccatcagattcgggataggtagatttacgacggacgaggaaatcgactatgtcattaaggctatcacagaaagagttgagttcttgagagagctttcgcctctgtgggagatggtcaaggagggtattgacttgaactctatcgagtggtctggtcattag

SEQ ID NO: 245 - protein, 478 aa, Kluyveromyces thermotolerans
MLRSFGRSVFSRQRLVGAVARRGYATAKVAFDVPLETHTDLQKANEDLAQARSNSAEVIESGSTALKHAYQENTGFGTRPIYLDMQATTPTDPRVLDTMLKFYTGLYGNPHSNTHSYGWETNKEVETARKHIADVINADVKEIVFTSGATESNNMALKGVSRFYKKTKNHIITTRTEHKCVLEAARAMKNEGYDVTFLNVDEYGLVDLKELEAAIKPTTCLVSVMAVNNEIGVMQPIKEIGAICRKNKVFFHTDAAQAYGKIPLDVNDMNIDLLSISSHKIYGPKGMGALFVRRRPRVRLDPIISGGGQERGLRSGTLAPSLVAGFGEAARLVKQEYETDIDHVKRLSEKLTKGLLAIEHTSLNGSPDHRYPGCVNVSFAYVEGESLLMALRDIALSSGSACTSASLEPSYVLHALGKDDAMAHSSIRFGIGRFTTDEEIDYVIKAITERVEFLRELSPLWEMVKEGIDLNSIEWSGH

SEQ ID NO: 246 - DNA, 1494 bp, Kluyveromyces polyspora
atgttaaaaaatactagaactaatggattgttgaagaccagttatagagttttcggtttacagaatgtgcatcctttaaagttttattcttcttctgctgctgctactgccgttaaaaaaatagcagataatatttctttggagactcatactgatatacaagctgctgctagagaacaagctgaagaaagatcatctgctggtaatgattccgcttccaatggtgtaggaggattcactgctccaaatgcattgaaacatgcttatcaagaaaatactggcttcggtacaagaccaatttatttagacatgcaggcaactactcctaccgatccaagagtattggatacaatgttgaagttttatactggtttatacggtaacccacattcaaatacccatgcttacggttgggaaacaaataaagaaattgaaacagcgagagagcatgttgcaaaattaatcaatgctgatccaaaggaaatcgtattcacatcaggtgcaacagaatctaataatatggttgttaaaggtatagcaagattttataaaaagactaaaaatcatattataactacaagaaccgaacataaatgtgtcttggaggcggcaagggcgatgattaatgaaggtttcgaggttacatttttaaatgttaatgaagacgggttaattgatttggaagatttgaaaaaaaatatacgtccagaaacatgcttaatatcagtcatggctgtaaataatgaaattggtgtaatgcaacctataaaggaaattggtgaaatttgtagaaagaataaaatatttttccatacagatgctgcccaagcttatggtaaagtgcctcttgatgttgacaaaatgaatatagacttaatgtctatatcttctcataagatatatggtccaaaaggtattggtgctctatatgtaagaagaagaccaagagttagattggatcctctactatcaggtggtggtcaagaaagaggtttgagatcaggtaccttggctccacctttagttgctggttttggtgaagcagcaagactgatgaaacaagagtatgatgctgacgtcgcccatataacaagattgtctaaaaaattaatggataacttactggctctagaacatacaacattaaatggttcttcaaagcatcgttatcctggttgtgttaatgtctcatttgcatatgttgaaggtgaatcattacttatggcactaagggatattgctttatcttcaggttctgcctgtacatctgcttctttggaaccatcatatgtgctacacgctttaggtaaagacgatgccttagcacactcctcgattagatttggtattggtagattcactactgaagatgaggttgattatgtcatcaaggccatcgtagaaagggttaaatatttaagggaactatcaccactttgggaaatggtacaggaaggtatcgatttaaattcaattaaatggtcagggcattaa

SEQ ID NO: 247 - protein, 497 aa, Kluyveromyces polyspora
MLKNTRTNGLLKTSYRVFGLQNVHPLKFYSSSAAATAVKKIADNISLETHTDIQAAAREQAEERSSAGNDSASNGVGGFTAPNALKHAYQENTGFGTRPIYLDMQATTPTDPRVLDTMLKFYTGLYGNPHSNTHAYGWETNKEIETAREHVAKLINADPKEIVFTSGATESNNMVVKGIARFYKKTKNHIITTRTEHKCVLEAARAMINEGFEVTFLNVNEDGLIDLEDLKKNIRPETCLISVMAVNNEIGVMQPIKEIGEICRKNKIFFHTDAAQAYGKVPLDVDKMNIDLMSISSHKIYGPKGIGALYVRRRPRVRLDPLLSGGGQERGLRSGTLAPPLVAGFGEAARLMKQEYDADVAHITRLSKKLMDNLLALEHTTLNGSSKHRYPGCVNVSFAYVEGESLLMALRDIALSSGSACTSASLEPSYVLHALGKDDALAHSSIRFGIGRFTTEDEVDYVIKAIVERVKYLRELSPLWEMVQEGIDLNSIKWSGH

SEQ ID NO: 248 - DNA, 1494 bp, Saccharomyces cerevisiae
atgttgaaatcaactgctacaagatcgataacaagattatctcaagtttacaacgttccagcggccacatatagggcttgtttggtaagcaggagattctattcccctcctgcagcaggcgtgaagttagacgacaacttctctctggaaacgcataccgatattcaggctgctgcaaaggcacaggctagtgcccgtgcgagtgcatccggtaccaccccagatgctgtagtagcttctggtagcactgcaatgagccatgcttatcaagaaaacacaggttttggtactcgtcccatatatcttgacatgcaagccactacaccaacagaccctagggttttggatacgatgttgaagttttatacgggactttatggtaatcctcattccaacactcactcttacggttgggaaacaaatactgctgtggaaaatgctagagctcacgtagcaaagatgatcaatgccgaccccaaggaaataatattcacttcgggagcgaccgaatctaataatatggttcttaagggtgtcccaagattttataagaagactaagaaacacatcatcaccactagaacggaacacaagtgtgtcttggaagccgcacgggccatgatgaaggagggatttgaagtcactttcctaaatgtggacgatcaaggtcttatcgatttgaaggaattggaagatgccattagaccagatacctgtctcgtctctgtgatggctgtcaataatgaaatcggtgtcattcaacctattaaagaaattggtgcaatttgtagaaagaataagatctactttcatactgacgccgcacaagcctatggtaagattcacattgatgtcaatgaaatgaacattgatttactatcaatttcttctcacaagatttacggtccaaagggaataggtgccatctatgtaagaaggagaccaagagttagattagaacctttactatccggtggtggccaagagagaggattgagatctggtactttggcccccccattggtagcgggatttggtgaagctgcgagattgatgaagaaagaatttgacaacgaccaagctcacatcaaaagactatccgataaattagtcaaaggtctattatccgctgaacataccacgttgaacggatctccagatcatcgttatccagggtgtgttaacgtttctttcgcctacgtggaaggagaatctttattgatggcactaagggatatcgcattatcctcgggttcagcctgtacatctgcttccctagaaccttcttatgttttacatgcgctgggtaaggatgatgcattagcccattcttccatcagatttggtattggtagatttagtactgaagaggaggtcgactacgtcgttaaggccgtttctgacagagtaaaattcttgagggaactttcaccattatgggaaatggttcaagaaggtattgacttaaactccatcaaatggtcaggtcattga

SEQ ID NO: 249 - protein, 497 aa, Saccharomyces cerevisiae
MLKSTATRSITRLSQVYNVPAATYRACLVSRRFYSPPAAGVKLDDNFSLETHTDIQAAAKAQASARASASGTTPDAVVASGSTAMSHAYQENTGFGTRPIYLDMQATTPTDPRVLDTMLKFYTGLYGNPHSNTHSYGWETNTAVENARAHVAKMINADPKEIIFTSGATESNNMVLKGVPRFYKKTKKHIITTRTEHKCVLEAARAMMKEGFEVTFLNVDDQGLIDLKELEDAIRPDTCLVSVMAVNNEIGVIQPIKEIGAICRKNKIYFHTDAAQAYGKIHIDVNEMNIDLLSISSHKIYGPKGIGAIYVRRRPRVRLEPLLSGGGQERGLRSGTLAPPLVAGFGEAARLMKKEFDNDQAHIKRLSDKLVKGLLSAEHTTLNGSPDHRYPGCVNVSFAYVEGESLLMALRDIALSSGSACTSASLEPSYVLHALGKDDALAHSSIRFGIGRFSTEEEVDYVVKAVSDRVKFLRELSPLWEMVQEGIDLNSIKWSGH

SEQ ID NO: 250 - DNA, 285 bp, Saccharomyces cerevisiae
atgcctggatttacagctccaacaagaaggcaggtgttgtctttatacaaggaattcatcaagaatgctaatcaattcaataattacaacttcagggaatactttttaagtaaaacaaggactactttcagaaagaacatgaatcagcaagacccaaaagtgttaatgaacctatttaaggaagctaagaacgacttaggtgtcttgaaaagacagtctgttatttctcagatgtacacatttgacaggctggtcgtagaaccattgcaaggaagaaaacactaa

SEQ ID NO: 251 - protein, 94 aa, Saccharomyces cerevisiae
MPGFTAPTRRQVLSLYKEFIKNANQFNNYNFREYFLSKTRTTFRKNMNQQDPKVLMNLFKEAKNDLGVLKRQSVISQMYTFDRLVVEPLQGRKH

SEQ ID NO: 252 - DNA, 288 bp, Saccharomyces castellii
atgcctgcaactccttcaagactgcaagtactatcgctttataagcaattcattagaaattcaaaccaatttaacaatttcaactttagagaatactttctaagaatatccagggagaaattcaaagaaaatgccccaatacaggataaagagaaggtagcaaaactatacgaagcagcacaaagagatcttggagttttaaagagacaaaaactaatctcccagatgtacaccttcgataaattggttgtagaatctgccaaggatcaaggagactcaagatcataa

SEQ ID NO: 253 - protein, 95 aa, Saccharomyces castellii
MPATPSRLQVLSLYKQFIRNSNQFNNFNFREYFLRISREKFKENAPIQDKEKVAKLYEAAQRDLGVLKRQKLISQMYTFDKLVVESAKDQGDSRS

SEQ ID NO: 254 - DNA, 300 bp, Kluyveromyces waltii
atgtcgacacctgctggccctacacgtgcacaagttctggcgctctataagcagttcatcaagaatgccaacggcttcaataactacaactatcgtgagtactttctgcggaaagccagaactactttcagagagcataaaaccctaactgaccctgcgagtgtggaaactgcctgggaaattgcaaacaaagagcttggcgtccttaagaggcagtctgtgatatctcagatgtatacattcgacaagcaagtggttgagccactggatcggaaacacaactctaggggccatcaatga

SEQ ID NO: 255 - protein, 99 aa, Kluyveromyces waltii
MSTPAGPTRAQVLALYKQFIKNANGFNNYNYREYFLRKARTTFREHKTLTDPASVETAWEIANKELGVLKRQSVISQMYTFDKQVVEPLDRKHNSRGHQ

SEQ ID NO: 256 - DNA, 273 bp, Kluyveromyces polyspora
atgagtgcagcaccaagtagaggtcaagttcttaatttgtataagcaatttattaaaaatgcaaaccaatttaataattacaatttcaaagaatactttctaaggaggtccagagaaagttttagagctaattcgaagatacaagatccagtggaactagctaaagtttatagagatgcgcaatttgatttggctgtgttgaaaagacaatccatcatttcacagttgtatacctttgacaagttagttgtcgaaccagtggcagaaaaataa

SEQ ID NO: 257 - protein, 90 aa, Kluyveromyces polyspora
MSAAPSRGQVLNLYKQFIKNANQFNNYNFKEYFLRRSRESFRANSKIQDPVELAKVYRDAQFDLAVLKRQSIISQLYTFDKLVVEPVAEK

SEQ ID NO: 258 - DNA, 282 bp, Saccharomyces kluyveri
atgactgccacagttcctactagaccacaagtgctagccctatacagacagtttgtgaagaatgctaacaacttcaacaactacaactttagagagtactttttgagaaaggcaagaacaactttcaaagaaagcaagcagctacaggattctaccaaggtgaacgctgcctgggaggaagcacaacgagaattgggtgttttgaagagacaatcggtcatatcacagatgtacacctttgataaactggttgtcgaaccgttgcgtaagaaacatcattaa

SEQ ID NO: 259 - protein, 93 aa, Saccharomyces kluyveri
MTATVPTRPQVLALYRQFVKNANNFNNYNFREYFLRKARTTFKESKQLQDSTKVNAAWEEAQRELGVLKRQSVISQMYTFDKLVVEPLRKKHH

SEQ ID NO: 260 - DNA, 285 bp, Saccharomyces bayanus
atgcctggcgttacagctccaacgagaggacaagtgttgtcgttatacaaacaatttatcaagaattccaaccagttcaataattacaacttcagacagtacttcctaagaagaacaagagacactttcagggataatgtgaaccagaaagacccgaaagtgctaatgaatctattcaaggacgcgaagaacgaattaggtgtcttgaaaagacagtcagtcatttcccaaatgtacaccttcgatagactggttgtggaaccgttgaaaggaaggaaacactaa

SEQ ID NO: 261 - protein, 94 aa, Saccharomyces bayanus
MPGVTAPTRGQVLSLYKQFIKNSNQFNNYNFRQYFLRRTRDTFRDNVNQKDPKVLMNLFKDAKNELGVLKRQSVISQMYTFDRLVVEPLKGRKH

SEQ ID NO: 262 - DNA, 327 bp, Ashbya gossypii
atgcaagtgagcataaatcgctcgcgcgcgcagcggagtctgctcctgtccgccacaactacaatggcgggacccactagagcaggcgtgctgcacctctaccgcgaatttgtgcgcagcgcgcgccagttcaacaactacaacttccgcgagtacttcatgcgccactcgcgcgacaccttccggaagcacagggaggcctcgggcgaggagctgcaacagctgtgggagcgagcgcagcaggaggtgggagtgttgaagcggcagagcgtgatctctcagatgtatactttcgataagctagtcgtcgagcaactgcgcaagtga

SEQ ID NO: 263 - protein, 108 aa, Ashbya gossypii
MQVSINRSRAQRSLLLSATTTMAGPTRAGVLHLYREFVRSARQFNNYNFREYFMRHSRDTFRKHREASGEELQQLWERAQQEVGVLKRQSVISQMYTFDKLVVEQLRK

SEQ ID NO: 264 - DNA, 276 bp, Zygosaccharomyces rouxii
atgtcatctttgacaagaactcaggttctaggtctttacaagcaatttatcaagaacgctaataacttcaacgactataacttcaaaaattactttctaagaagaacaagggcttcattcagggaaaatagagatgtcaaagatcaggagaaactaaatttactttatacaaatgctttgaaagacctaggtgttctaaagagacagtcactaatatcgcagatgtacacctttgacaagttagttgtcgaacctctaaaaacagagcatgaataa

SEQ ID NO: 265 - protein, 91 aa, Zygosaccharomyces rouxii
MSSLTRTQVLGLYKQFIKNANNFNDYNFKNYFLRRTRASFRENRDVKDQEKLNLLYTNALKDLGVLKRQSLISQMYTFDKLVVEPLKTEHE

SEQ ID NO: 266 - DNA, 294 bp, Kluyveromyces thermotolerans
atgtccgcttctccagggccttcgcgtgctcaagttttggcgctttacaagcagttcatcaaaaatgcaaatggtttcaataactacaactaccgcgagtatttcttgcgcaaggccagaacaactttcagaaaaaacagagctctagaggacccagctaccatcagtgctgcgtgggacactgcgctcaaagacctgggcgtacttaaaagacagtccgtcatttcgcagatgtacactttcgacaagcaggtggtggagcctttggatccaaagcaccactcgaggggttga

SEQ ID NO: 267 - protein, 97 aa, Kluyveromyces thermotolerans
MSASPGPSRAQVLALYKQFIKNANGFNNYNYREYFLRKARTTFRKNRALEDPATISAAWDTALKDLGVLKRQSVISQMYTFDKQVVEPLDPKHHSRG

SEQ ID NO: 268 - DNA, 312 bp, Candida glabrata
atggtagccagacagcaggtattgcagctttacaagcagataatcaagaacgccaaccagttcagtaactacaacttccgggagtacttcctgaggaaggccaggacagagttcaaggcgaacaaggctctgacggacgcagctaagatagagtccctattccaaggcgcgcagcgcgacctcggcgtgttgaagagacagtccattatatcacagatgtacacctttgacaagctggtggtggagccagtggagccagtggagccagtggagccagtggagccagtggagcccgtggagccaaagcagtaa

SEQ ID NO: 269 - protein, 103 aa, Candida glabrata
MVARQQVLQLYKQIIKNANQFSNYNFREYFLRKARTEFKANKALTDAAKIESLFQGAQRDLGVLKRQSIISQMYTFDKLVVEPVEPVEPVEPVEPVEPVEPKQ

SEQ ID NO: 270 - DNA, 276 bp, Kluyveromyces lactis
atgccagctactggagcaagcaaaacgcagatattgcatatgtataaagagttcatcaggaacgcgagcaagatacagaattacaatttcagagagtattttttaagaagggcaagagagtcattccgtgccaataagaacgttgaaaatcctgaaaagatcagcgaattgctttctgaggcagaaaaagaccttggtgtattgaagaggcaatctgtgatctctaacatgtacacatttgataaattagtggttgagcctctgaagaagcgttag

SEQ ID NO: 271 - protein, 91 aa, Kluyveromyces lactis
MPATGASKTQILHMYKEFIRNASKIQNYNFREYFLRRARESFRANKNVENPEKISELLSEAEKDLGVLKRQSVISNMYTFDKLVVEPLKKR

SEQ ID NO: 272 - DNA, 285 bp, Saccharomyces cerevisiae; identical to SEQ ID NO: 250

SEQ ID NO: 273 - protein, 94 aa, Saccharomyces cerevisiae; identical to SEQ ID NO: 251

What is claimed is:

1. A recombinant yeast microorganism comprising a recombinantly overexpressed polynucleotide encoding a dihydroxy acid dehydratase (DHAD), wherein said recombinant yeast microorganism is engineered to overexpress:
(a) one or more polynucleotides encoding one or more cysteine desulfurase (Nfs1) proteins; and
(b) one or more polynucleotides encoding one or more iron-sulfur protein biogenesis desulfurase-interacting (Isd11) proteins.

2. The recombinant yeast microorganism of claim 1, wherein said one or more polynucleotides of (a) and/or (b) is a native polynucleotide.

3. The recombinant yeast microorganism of claim 1, wherein said one or more polynucleotides of (a) and/or (b) is a heterologous polynucleotide.

4. The recombinant yeast microorganism of claim 1, wherein said DHAD is localized in the cytosol.

5. The recombinant yeast microorganism of claim 1, wherein said DHAD is localized in the mitochondria.

6. The recombinant yeast microorganism of claim 1, wherein said recombinant yeast microorganism is engineered to overexpress one or more polynucleotides encoding one or more activator of ferrous transport (Aft) proteins.

7. The recombinant yeast microorganism of claim 6, wherein said Aft protein is a constitutively active Aft protein.

8. The recombinant yeast microorganism of claim 1, wherein said recombinant yeast microorganism is engineered to express at least one polynucleotide encoding a mutant Aft protein, wherein said mutant Aft protein is constitutively active.

9. The recombinant yeast microorganism of claim 1, wherein said DHAD is derived from Lactococcus lactis.

10. The recombinant yeast microorganism of claim 1, wherein said DHAD is derived from Streptococcus mutans.

11. The recombinant yeast microorganism of claim 1, wherein said recombinant microorganism comprises an isobutanol producing metabolic pathway, said isobutanol producing metabolic pathway comprising the following substrate to product conversions:
(a) pyruvate to acetolactate;
(b) acetolactate to 2,3-dihydroxyisovalerate;
(c) 2,3-dihydroxyisovalerate to α-ketoisovalerate;
(d) α-ketoisovalerate to isobutyraldehyde; and
(e) isobutyraldehyde to isobutanol;
and wherein said DHAD catalyzes the conversion of 2,3-dihydroxyisovalerate to α-ketoisovalerate.

12. The recombinant yeast microorganism of claim 11, wherein the enzyme that catalyzes the conversion of pyruvate to acetolactate is an acetolactate synthase.

13. The recombinant yeast microorganism of claim 11, wherein the enzyme that catalyzes the conversion of acetolactate to 2,3-dihydroxyisovalerate is a ketol-acid reductoisomerase.

14. The recombinant yeast microorganism of claim 13, wherein said ketol-acid reductoisomerase is an NADH-dependent ketol-acid reductoisomerase.

15. The recombinant yeast microorganism of claim 11, wherein the enzyme that catalyzes the conversion of α-ketoisovalerate to isobutyraldehyde is a 2-keto acid decarboxylase.

16. The recombinant yeast microorganism of claim 11, wherein the enzyme that catalyzes the conversion of isobutyraldehyde to isobutanol is an alcohol dehydrogenase.

17. The recombinant yeast microorganism of claim 16, wherein said alcohol dehydrogenase is an NADH-dependent alcohol dehydrogenase.

18. The recombinant yeast microorganism of claim 11, wherein said recombinant yeast microorganism is engineered to inactivate one or more endogenous pyruvate decarboxylase (PDC) genes.

19. The recombinant yeast microorganism of claim 11, wherein said recombinant yeast microorganism is engineered to inactivate one or more endogenous glycerol-3-phosphate dehydrogenase (GPD) genes.

20. A method of producing isobutanol comprising: (a) providing the recombinant yeast microorganism of claim 11; and (b) cultivating the recombinant yeast microorganism of claim 11 in a culture medium containing a feedstock providing a carbon source, until the isobutanol is produced.
